(19) United States
(12) Patent Application Publication
(10) Pub. No.: US 2022/0283144 A1
(43) Pub. Date: Sep. 8, 2022

(54) COMPOSITIONS AND METHODS IDENTIFYING AND USING STEM CELL DIFFERENTIATION MARKERS

(71) Applicant: The Board of Trustees of the Leland Stanford Junior University, Stanford, CA (US)

(72) Inventors: Lei S. Qi, Stanford, CA (US); Yanxia Liu, Stanford, CA (US)

(73) Assignee: The Board of Trustees of the Leland Stanford Junior University, Stanford, CA (US)

(21) Appl. No.: 17/496,275

(22) Filed: Oct. 7, 2021

Related U.S. Application Data
(63) Continuation of application No. 15/863,005, filed on Jan. 5, 2018, now abandoned.
(60) Provisional application No. 62/443,401, filed on Jan. 6, 2017.

(51) Int. Cl. G01N 33/50; C12N 9/12; C12N 15/65; C12N 9/22; G01N 33/68; C12N 5/071

(52) U.S. Cl. CPC G01N 33/5073; C12N 9/1276; C12N 15/65; C12N 9/22; G01N 33/6887; C12N 5/0697; C12N 2310/20; C12N 2502/1323

(57) ABSTRACT

Provided herein are compositions and methods for identifying and using stem cell regulation factors. For example, in some embodiments, provided herein are compositions and methods for identifying stem cell regulation factors using marker gene expression libraries. Also provided herein are compositions and methods for generating differentiated cells lines and uses of such cell lines.

### CROSS REFERENCE TO RELATED APPLICATIONS

[0001] This application is a continuation of U.S. patent application Ser. No. 15/863,005, filed Jan. 5, 2018, which claims the benefit of U.S. Provisional Application No. 62/443,401, filed Jan. 6, 2017, both of which are incorporated herein by reference in their entireties.

### STATEMENT REGARDING FEDERALLY-SPONSORED RESEARCH

[0002] The invention was made with Government support under contract OD017887 awarded by the National Institutes of Health. The Government has certain rights in the invention.

### SEQUENCE LISTING

[0003] The instant application contains a Sequence Listing which has been filed electronically in ASCII format and is hereby incorporated by reference in its entirety. Said ASCII copy, created Oct. 6, 2021, is named 079445-1273450-006220US_SL.txt and is 1.47 MB (1,547,157) bytes in size.

### FIELD

[0004] Provided herein are compositions and methods for identifying and using stem cell differentiation regulation factors. For example, in some embodiments, provided herein are compositions and methods for identifying stem cell differentiation regulation factors using marker gene expression libraries. Also provided herein are compositions and methods for generating differentiated and induced cells lines and uses of such cell lines.

### BACKGROUND

[0005] Stem cells are cells that are capable of differentiating into many cell types. Embryonic stem cells are derived from embryos and are potentially capable of differentiation into all of the differentiated cell types of a mature body. Certain types of stem cells are “pluripotent,” which refers to their capability of differentiating into many cell types. One type of pluripotent stem cell is the human embryonic stem cell (hESC), which is derived from a human embryonic source. Human embryonic stem cells are capable of indefinite proliferation in culture, and therefore, are an invaluable resource for supplying cells and tissues to repair failing or defective human tissues in vivo.

[0006] Similarly, induced pluripotent stem (iPS) cells, which may be derived from non-embryonic sources, can proliferate without limit and differentiate into each of the three embryonic germ layers. It is understood that iPS cells behave in culture essentially the same as ESCs. Human iPS cells and ES cells express one or more pluripotent cell-specific markers, such as Oct-4, SSEA-3, SSEA-4, Tra 1-60, Tra 1-81, and Nanog (Yu et al. Science, Vol. 318. No. 5858, pp. 1917-1920 (2007); herein incorporated by reference in its entirety). Also, recent findings of Chan, indicate that expression of Tra 1-60, DNMT3B, and REX1 can be used to positively identify fully reprogrammed human iPS cells, whereas alkaline phosphatase, SSEA-4, GDF3, hTERT, and NANOG are insufficient as markers of fully reprogrammed human iPS cells. (Chan et al., Nat. Biotech. 27:1033-1037 (2009); herein incorporated by reference in its entirety).

[0007] The cell fate decision making of stem cells is governed by multistep dynamic processes, in which transcriptional networks play a critical role (Chambers and Tomlinson, 2009 Development 136, 2311-2322; Filipczyk et al., 2015 Nat. Cell Biol. 17, 1235-1246; Kim et al., 2008 Cell 132, 1049-1061; MacArthur et al., 2009 Nat. Rev. Mol. Cell Biol. 10, 672-681). Expression of different transcription factors coordinate to activate or suppress sets of genes specific to different lineages, serving as major regulators that maintain cell identities or drive cell fate transitions (Iwafuchi-Doi and Zaret, 2014 Genes Dev. 28, 2679-2692; Zaret and Carroll, 2011 Genes Dev. 25, 2227-2241). The successes of somatic cell reprogramming and directed lineage differentiation using transcription factors highlight their central role in cell fate determination (Davis et al., 1987 Cell 51, 987-1000; Takahashi and Yamanaka, 2006 Cell 126, 663-676; Vierbuchen et al., 2010 Nature 463, 1035-1041; Xu et al., 2015 Cell Stem Cell 16, 119-134). Over the past few decades, although individual or combinatorial transcription factors have been identified for cell differentiation, there is a dearth of systematically unbiased studies of how specific genetic programs determine cell fate maintenance and transitions. Because of this, the available tools to control stem cell differentiation are limited and the full promise of stem cells as therapeutic, drug screening, and research tools have gone unmet.

[0008] A systematic screening approach to profile and characterize all transcription factors is needed to offer new insights into their contributions to cell fate decisions, which greatly enhances the ability to manipulate cell fate for both basic research and therapeutic purposes.

### SUMMARY

[0009] Provided herein are compositions and methods for identifying and using stem cell differentiation regulation factors. For example, in some embodiments, provided herein are compositions and methods for identifying stem cell differentiation regulation factors using marker gene expression libraries. Also provided herein are compositions and methods for generating differentiated and induced cells lines and uses of such cell lines.

[0010] The compositions, systems, kits, and methods of the present disclosure overcome limitations of existing technologies to identify transcription factors and nucleic that drive differentiation of pluripotent cells. The transcription factors identified using the described methods find use in research, screening, and therapeutic applications.

[0011] In some embodiments, provided herein are systems and methods for identifying factors involved in (e.g., that regulate or control) the differentiation of stem cells by employing a CRISPR activation (CRISPRa)-mediated gain-of-function screening platform. In some such embodiments, a reporter stem cell line is generated that comprises components of a CRSIPR activation system. In some embodiments, the cell line is exposed to an sgRNA library targeting all putative transcription factors or other candidate factors that may be involved in a cellular differentiation process.

[0012] In some embodiments, the CRISPR activation system comprises a dCas9 construct under the transcriptional control of a first promoter. In some embodiments, the dCas9 is fused to a peptide epitope. In some embodiments, the activation system further comprises a VP64 transactivation domain under the transcriptional control of a second promoter. In some embodiments, the VP64 transactivation domain is fused to a peptide that specifically binds to the peptide epitope. In some embodiments, the activation system further comprises a selection marker under the transcriptional control of a third promoter. In some embodiments, each of the first, second, and third promoters are different than each other.

[0013] For example, in some embodiments, provided herein is a method of identifying pluripotent cell differentiation markers, comprising: a) generating a pluripotent cell line that expresses i) nuclease dead Cas9 fused to a plurality of peptide epitopes; ii) a single chain variable chain antibody fragment specific for the peptide epitope fused to a VP64 tranactivator domain; and iii) a transactivator polypeptide; b) contacting the cell line with a plurality of single guide RNAs (sgRNAs) specific for activation of pluripotent cell differentiation factors to generate a gene activation library; c) sorting the library to identify pluripotent cells that retain pluripotency or differentiate; and d) identifying cell differentiation factors that induce or prevent differentiation of the pluripotent cells. In some embodiments, the differentiation factors are transcription factors or non-coding (e.g., lincRNAs). In some embodiments, the cells are further contacted with a plurality of non-targeting sgRNAs (e.g., to serve as a negative control). In some embodiments, the cells further overexpress endogenous POU domain, class 3, transcription factor 2 (Brn2). In some embodiments, each cell differentiation factors is targeted with a plurality (e.g., at least 10, 20, 30, 40, 50, 60, 70, 80, 90, or 100) distinct sgRNAs. In some embodiments, the cells that retain pluripotency are identified by screening for expression of SSEA1 after culture in media lacking inhibitors of GSK3 and ERK pathways. In some embodiments, cells that differentiate are identified by expression of a differentiation marker. For example, in some embodiments, cells that differentiate into neuronal cells express Tuj1. In some embodiments, the identifying comprises sequencing of sgRNAs after selection for cells that retain pluripotency or differentiate. In some embodiments, the sequencing further comprises comparing the level of the sgRNAs to the level of non-targeting sgRNAs. In some embodiments, cell differentiation factors that retain pluripotency are one or more of the regulation factors shown in FIG. 3 or Table 3. In some embodiments, cell differentiation factors that are associated with differentiation into neuronal cells are one or more of the regulation factors shown in FIG. 6 or Tables 4 and 10. In some embodiments, the sgRNAs are dual-sgRNA-constructs comprising two sgRNAs. In some embodiments, the method further comprises contacting the cell differentiation factors with a fibroblast cell line and identifying cell differentiation factors that promote transdifferentiation of the fibroblast cell line. In some embodiments, the fibroblast cell line is contacted with combinations of two or more cell differentiation factors. In some embodiments, the cell differentiation factors that promote transdifferentiation are a combination of Ezh2 or Ngn1 and one or more additional markers (e.g., Ngn1+Brn2, Brn2+Ezh2, Mecom+Ezh2, Ngn1+Ezh2 or Ngn1+Foxo1).

[0014] In some embodiments, the pluripotent cells are induced pluripotent stem cells, adult stem cells, or embryonic stem cells. In some embodiments, the method further comprises the step of activating pairs or groups of pluripotent cell differentiation factors.

[0015] In some embodiments, the method comprises or further comprises the step of performing a CRISPR gene repression screen. For example, in some embodiments, the CRISP repression screen comprises: a) contacting a pluripotent cell that expresses dCas9 fused to a transcription repressor domain with a plurality of sgRNAs specific for repression of a plurality of cell differentiation factors; b) sorting the library to identify cells that retain pluripotency or differentiate; and c) identifying cell differentiation factors that induce or prevent differentiation of said pluripotent cells. In some embodiments, the CRISPR repression screen and the CRISPR activation screen are performed in the same or different pluripotent cells. In some embodiments, the CRISPR repression screen and the CRISPR activation screen are performed simultaneously using vectors comprising a first sgRNA specific for activation of a first cell differentiation factor and a second sgRNA specific for repression of a second cell differentiation factor.

[0016] Further embodiments provide a library of pluripotent cells generated by the methods descried herein.

[0017] Additional embodiments provide a kit or system, comprising: a) a pluripotent cell line that expresses i) nuclease dead Cas9 fused to a plurality of peptide epitopes; ii) a single chain variable chain antibody fragment specific for the peptide epitope fused to a VP64 tranactivator domain; and iii) a transactivator polypeptide; and b) a plurality of single guide RN As (sgRNAs) specific for activation of pluripotent cell differentiation factors. In some embodiments, the kit or system further comprises reagents for analysis of one or more properties (e.g., pluripotency or differentiation) of the cell lines. In some embodiments, the kit or system further comprises reagents for sequencing the cells to identify the presence of said sgRNAs. In some embodiments, the system comprises or further comprises a CRISPR repression system as described herein. In some embodiments, the system comprises one or more sgRNAs (e.g., 10 or more, 100 or more, 1000 or more, or 5000 or more) described in Table 13 (e.g., SEQ ID NOs:586-8317).

[0018] Yet other embodiments provide a method of determining the differentiation status of pluripotent or somatic cells, comprising: a) assaying the cells for the expression of one or more transcription factors or lincRNAs selected from those in FIGS. 3 and 6 and Tables 3 and 4; and b) determining the differentiation status of the cells based on the expression. In some embodiments, the presence or increased level of the cell transcription factors in FIG. 3 or Table 3 are indicative of cells that retain pluripotency. In some embodiments, the cell transcription factors are not Nanog, Sox2, Klf4, or Oct4. In some embodiments, the cell transcription factors selected from, for example, Mixip, Etv2, Zc3h11a, Zfp36, Isl2, Tfeb, Fig1a, Hsf2, or Hoxc11 are indicative of cells that retain pluiripotency. In some embodiments, the presence or increased level of the cell transcription factors shown in FIG. 6 or Table 4 is indicative of cells that have differentiated into neuronal cells. In some embodiments, the cell differentiation factors are not Neurog1, Brn2, or KIlf12. In some embodiments, the cell differentiation factors are selected from, for example, Ezh2, Suz12, or Jun.

[0019] Still further embodiments provide a method of differentiating pluripotent or somatic (e.g., fibroblast) cells into neuronal cells, comprising: inducing expression of one or more cell regulation factors shown in FIG. 6 or Table 4 in the pluripotent cells. In some embodiments, the cell differentiation factors are selected from, for example, Ezb2, Ngn1, Suz12, or Jun. In some embodiments, the inducing expression comprises contacting the pluripotent cells with a nucleic acid encoding one or more of the cell differentiation factors, contacting the pluripotent cells with an sgRNA that induces expression of one or more of the cell differentiation factors, or contacting the pluripotent cells with a small molecule that induces expression of the cell differentiation factors. In some embodiments, the method further comprises the step of determining the presence of increased level of expression of the cell differentiation factors shown in FIG. 6 or Table 4. In some embodiments, the presence or increased level of the cell differentiation factors shown in FIG. 6 or Table 4 is indicative of cells that have differentiated into neuronal cells.

[0020] Certain embodiments provide differentiated cells generated by the methods described herein.

[0021] Embodiments of the present disclosure provide a plurality of neuronal cells that express one or more cell differentiation regulation factors shown in FIG. 6 or Table 4 (e.g., one or more of Ezh2, Suz12 or Jun).

[0022] Further embodiments provide a method of inducing pluripotency or maintaining pluripotency of a cell line (e.g., a somatic or pluripotent cell line), comprising: inducing expression of one or more cell regulation factors shown in FIG. 3 or Table 3 in said cells (e.g., one or more of Mlxip, Etv2, Zinc Zc3h11a, Zfp36, Isl2, Tfeb, Fig1a, Hsf2, or Hoxc11).

[0023] Still other embodiments provide a plurality of pluripotent cells generated or maintained by the methods described herein.

[0024] In other embodiments, the present disclosure provides a plurality of pluripotent or iPSCs cells that express one or more cell regulation factors shown in FIG. 3 or Table 3 (e.g., one or more of Mlxip, Etv2, Zinc Zc3h11a, Zfp36, is12, Tfeb, Fig1a, Hsf2, or Hoxc11).

[0025] Some embodiments provide a method of transplanting cells, comprising: transplanting differentiated cells generated by the methods described herein into a subject in need thereof (e.g., a subject diagnosed with a disease or condition).

[0026] Further embodiments are described herein.

### BRIEF DESCRIPTION OF THE DRAWINGS

[0027] FIG. 1A-D shows that enhanced CRISPR activation mouse ES (CamES) cells allow efficient single sgRNA-directed gene activation and stem cell fate control. (A) Engineered eCRISPRa system in mouse ES cells for single sgRNA-mediated self-renewal and differentiation control. (B) A panel of sgRNAs tiling along the upstream regulatory region of Asc11 relative to transcription start site (TSS) in CamES cells show a gradient of efficient gene activation. (C) Effective neural (day 8) and muscle (day 12) differentiation of CamES cells using a single sgRNA to activate endogenous genes. (D) Time-course measurement of endogenous gene expression (Asc11, Brn2, Tuj1, and Map2) during differentiation for CamES cells −sgRNA, +negative control sgRNA, or +sgAsc11, and E14 mouse ES cells +Asc11 cDNA.

[0028] FIG. 2A-E shows the use of an sgRNA library to screen genes that maintain pluripotency and self-renewal in mouse ES cells. (A) Schematic representation of CRISPRa-mediated gain-of-function screening (dropout) of genes that maintain pluripotency and self-renewal in CamES cells using a sgRNA library. (B) Flow cytometry data of library-transduced CamES cells during serial passages and after SSEA1 sorting. Negative control, isotype antibody control. (C) Microscopic images showing bright Feld (BF), Oct4 staining, and DAPI of library-transduced CamES cells in −2i medium at passage 2, passage 10 before SSEA1 sorting and passage 10 after sorting. Scale bar, 100 μm. (D) Boxplot of normalized sgRNA counts for the plasmid library, library-transduced CamES cells at D0, and library-transduced CamES cells after SSEA1 sorting. (E) Detected sgRNA counts (sgRNAs with at least one count) in the plasmid library, library-transduced CamES cells at D0, and library-transduced CamES cells after SSEA1 sorting.

[0029] FIG. 3A-C shows validation of top hits from the CRISPRa self-renewal screen. (A) A scatter plot showing enrichment of sgRNAs for ranked top hit genes. (B) Fold change of mRNA expression measure by quantitative PCR for each gene using their individual sgRNA in CamES cells. (C) Microscopic images and flow cytometry analysis of pluripotency markers Oct4, Nanog, and SSEA1 in CamES cells transduced with 18 individual sgRNAs in −2i medium after 10 passages.

[0030] FIG. 4A-D shows functional characterization and deep sequencing analysis of sgMlxip-transduced CamES cells confirm maintenance of pluripotency in −2i medium. (A) Spontaneous differentiation of sgMlxip- or sgKlf2-transduced CamES cells after 10 passages shows generation of three germ layers. (B) RNA-seq paired scatter plot analysis of the Wnt pathway gene expression comparing CamES +sgMlxip in −2i medium with CamES +2i medium (left, R²=0.81), and comparing CamES −sgMlxip in −2i medium and CamES −2i medium at day 7 (right, R²=0.35). (C) RNA-seq scatter plot analysis of the MAPK pathway gene expression comparing CamES +sgMlxip in −2i medium with CamES +2i medium (left, R²=0.90), and comparing CamES +sgMlxip in −2i medium and CamES −2i medium at day 7 (right, R²=0.59). (D) Normalized mRNA expression for genes in the PI3K pathway for CamES +sgMlxip in −2i medium, CamES +2i medium, and CamES −2i medium at day 7.

[0031] FIG. 5A-D shows the use of sgRNA library to screen genes that promote neural differentiation of mouse ES cells. (A) Schematic representation of CRISPRa-mediated gain-of-function screening (non-dropout) of genes that promote neural differentiation in CamES cells using an sgRNA library. (B) Quantification by qPCR for neural marker Tuj1 and Map2 expression before and after MACS sorting. (C) Boxplot of normalized sgRNA counts for the plasmid library, sorted Tuj1-hCD8+ cells, and sorted Tuj1-hCD8− cells. (D) Detected sgRNA counts (sgRNAs with at least one count) in the plasmid library, sorted Tuj1-hCD8+ cells, and sorted Tuj1-hCD8− cells.

[0032] FIG. 6A-F shows validation of top hits from CRISPRa neural differentiation screen. (A) Scatter plot of sgRNA enrichment for ranked top hit genes. Only sgRNAs enriched in both replicates are shown. 20 genes and their most enriched sgRNAs (orange) are chosen for validation. (B) Fold change of mRNA expression measure by quantitative PCR for each gene using their individual sgRNA in Tuj1-hCD8 CamES cells. (C) Quantification of hCD8+ cells measured by flow cytometry in Tuj1-hCD8 CamES cells transduced without sgRNA, with 6 individual non-targeting sgRNAs, and with 20 individual sgRNA hits after 12-day differentiation. (D) Quantification of NCAM+ cells measured by flow cytometry in CamES cells transduced without sgRNA, with 6 individual non-targeting sgRNAs, and with 20 individual sgRNA hits after 12-day differentiation. (E) Microscopic images ofMap2 staining in Tuj1-hCD8 CamES cells transduced with individual sgRNAs after 12-day differentiation. Scale bar, 100 μm. (F) Characterization of staining various neural lineage markers (Tuj1, Map2, NeuN, Olig2, GFAP, and vGluT1) in Tuj1-hCD8 CamES cells transduced with individual sgRNAs after 12-day differentiation.

[0033] FIG. 7A-G shows functional characterization and deep sequencing analysis of sgJun-mediated CamES neural differentiation. (A) Representative traces of membrane potentials of differentiated neurons from Tuj1-hCD8 CamES cells transduced with sgJun in response to step-voltage (left) and step-current injections (right). (B) Principle component analysis of RNA-seq samples from D0, D2, D5, and D12 of sgJun-transduced CamES cells. (C) RNA-seq analysis showing time-course expression of 6 pluripotency genes and 6 neural lineage genes during differentiation of sgJun-transduced CamES cells. Error bars, s.d.±the mean of four biological replicates. (D) Gene ontology analysis of genes that are enriched in D5 and D12 differentiated neural cells (left, D5 versus D0; right, D12 versus D0). (E) Western blot showing protein expression of Jun and phosphorylated Jun at different time points during differentiation. P-Jun: phosphorylated Jun. (F) RNA-seq paired scatter plot analysis of the downstream genes targeted by the AP-1 complex formed between Jun and c-Fos. Left, D2 versus D0 (p=0.2); middle, D5 versus D0 (p=0.002); and right, D12 versus D0 (p=0.004). (G) Gaussian kernel density plot of expression of the Wnt pathway genes in sgJun-directed differentiated cells at different time points during the neural differentiation.

[0034] FIG. 8A-H shows generation of eCRISPRa by systematic optimization of the CRISPRa-SunTag system. (A) A multiple lentiviral eCRISPRa system. (B) Comparison of endogenous Brn2 activation efficiency using 12 individual sgRNAs targeting Brn2 or their mixture for the SFFV-driven scFv-stGFP-VP64 CRISPRa system. (C) Comparison of endogenous Brn2 activation efficiency for different promoters driving scFv-sfGFP-VP64. Data is normalized to the −sgRNA sample. (D) Comparison of endogenous Brn2 activation efficiency for 6 clonal cell lines each generated from EF1a- or PGK-driven scFv-sfGFP-VP64 systems. Data is normalized to the −sgRNA sample. (E) Comparison of endogenous Brn2 activation efficiency for 28 clonal cell lines generated from the PGK-driven scFv-sfGFP-VP64 system. (F) Characterization of CamES cells for the morphology, expression of pluripotency marker Oct4, and expression of eCRISPRa components. (G) Negative staining of Tuj1 (red) in CamES cells, CamES cells +sgControl, and E14 mouse ES cells +sgAsc11 after 12-day differentiation. DAPI is shown in blue. (H) Microscopic images showing cell morphology of CamES cells +sgAsc11 (top) and E14 mouse ES cells +Asc11 cDNA (bottom) at D0, D6, and D12 during differentiation.

[0035] FIG. 9A-B shows an experimental procedure and characterization of the CRISPRa self-renewal screen in mouse ES cells. (A) Time line scheme of the gain-of-function self-renewal screen using the sgRNA library. (B) Correlation of sequenced sgRNA counts in library-transduced CamES cells at D0 and after SSEA1 sorting.

[0036] FIG. 10 shows a ranked gene list based on the dropout self-renewal screen described in FIGS. 2 and 3.

[0037] FIG. 11A-C shows RNA sequencing and characterization of CamES cells +sgMlxip or +sgKlf2 cultured in −2i medium. (A) Heatmap illustrating mRNA expression of the pluripotency-associated genes and lineage specific genes for indicated samples. (B) Histogram plot showing distribution of ratios of the Wnt pathway gene expression for indicated samples. (C) mRNA expression of indicated MAPK pathway genes in CamES cells in −2i medium at D7, in +2i medium, and transduced with sgMlxip in −2i medium.

[0038] FIG. 12A-F shows an experimental procedure and characterization of CRISPRa gain-of-function neural differentiation screen. (A) Sequencing results of the Tuj1 locus in Tuj1-hCD8 CamES cells. (B) Flow cytometry data (right) showing the hCD8+ percentage of cells in sgAsc11-transduced Tuj1-hCD8 CamES cells after 8-day differentiation. (C) Comparison of Tuj1 and Map2 mRNA expression levels in differentiated cells with various initial seeding cell densities. (D) Quantification of Tuj1 and Map2 mRNA expression levels in CamES cells, CamES cells +sgControl, and CamES cells +sgLibrary during differentiation. (E) Staining of neural markers Tuj1 and Map2 in library-transduced Tuj1-hCD8 CamES cells. (F) Time line scheme of the gain-of-function neural differentiation screen using the sgRNA library in Tuj1-hCD8 CamES cells.

[0039] FIG. 13 shows a ranked gene list based on non-dropout neural differentiation screen shown in FIGS. 5 and 6.

[0040] FIG. 14A-F shows characterization of sgJun-directed neural differentiated cells and analysis of dropout and non-dropout screens. (A) Heatmap illustrating mRNA expression of representative pluripotency-associated, progenitor neural lineage, terminal neural lineage, endoderm lineage, and mesoderm lineage genes. (B) Time-course of normalized RNA-seq mRNA counts of 12 genes in the MAPK and Wnt pathways during sgJun-direct CamES cells differentiation. (C) A hypothesized model for endogenous Jun activation-induced neural differentiation by sgJun. (D) Toy example of dropout (left) and non-dropout screens (right). In dropout screens, negative cells drop out of the population and have little noticeable effect. (E) The percentage of screen hits in common with Tuj1-hCD8+/D0 for the Tuj1-hCD8−/D0. SSEA1+/D0, and Tuj1-hCD8+/Tuj1-hCD8− gene ranks at a given hit cutoff. (F) The top ten enriched genes as calculated for Tuj1-hCD8+ relative to day 0, Tuj1-hCD8− relative to day 0, and Tuj1-hCD8+ relative to Tuj1-hCD8-.

[0041] FIG. 15A-G shows a CRISPRi experimental screening platform for studying genetic interactions. (A) The experimental setup of the single and double CRISPRi screening platform for GI studies. (B-E) Characterization of biological replicates for single and double sgRNA libraries (R1—biological replicate 1; R2, biological replicate 2): (B) single library without Dox at day 20; (C) single library with Dox at day 20; (D) double library without Dox at day 16; (E) double library with Dox at day 16. (F) Comparison of single library with and without Dox at day 20. (G) Comparison of double library with and without Dox at day 16.

[0042] FIG. 16A-F shows a time-course comparison of sgRNA enrichment for single and double libraries and validation of sgRNA pairs for epistatic interactions. (A) Comparing day 0 sample to other time points (grey—day 3; red—day 7; blue—day 13) in the presence of Dox for the single library. (B) The 20 genes among 112 epigenetic factor genes that showed consistent depletion over time due to CRISPRi inhibition. (C) Comparing day 0 sample to other time points (grey—day 8; blue—day 16) in the presence of Dox for the double library. For the comparison without Dox, refer to Fig. S4B. (D) A selected combinations that showed consistent depletion over time due to multiplexed CRISPRi inhibition. (E-F) Validation of two pairwise sgRNAs (MRGBP & MED6; BRD7 & LEO1) for their combinatorial effects in suppressing cell growth and endogenous gene expression.

[0043] FIG. 17 shows a module map of chromatin-related genes based on a curated set of protein complexes.

[0044] FIG. 18A-E shows (A) Schematic representation of CRISPRa-mediated gain-of-function screenings that promote neuronal differentiation in CamES cells using an sgRNA library. (B) Frequency histograms of the top 3 enriched sgRNAs targeting genes indicated. (C) Quantification of PSA-NCAM+ cells were measured by flow cytometry in CamES cells transduced with three individual sgRNAs of each gene after 12-day differentiation. (D) Microscopic images of Map2 staining in CamES cells transduced with individual sgRNAs after 12-day differentiation. Scale bar, 100 μm. (E) Staining of various neuronal lineage markers (NeuN, Olig2, GFAP, GABA, and vGluT1) in CamES cells transduced with individual sgRNAs after 12-day differentiation.

[0045] FIG. 19A-F shows (A) Schematic representation of CRISPRa-mediated gain-of-function double screenings that promote neuronal differentiation in CamES cells using a double sgRNA library. (B) Schematic of the two-guide vector. (C) Reproducibility between the two replicates of the paired CRISPR screen of gene-targeting and negative control (or vice versa) guide pairs, mean±s.e.m. (standard error of the mean). (D) Interaction scores for a pair were computed by subtracting off the maximum of the guide-level effect sizes. (E) Interaction forming capacities of the two sgRNAs inducing different gene activation levels. (F) Quantification of PSA-NCAM+ cells measured by flow cytometry in CamES cells transduced with one single sgRNA or double sgRNAs after 12-day differentiation. Error bars represent standard deviation of three independent experiments.

[0046] FIG. 20A-E shows (A) Quantification of MAP2+ cells from MEFs infected with different gene combinations. Averages from 20 randomly selected visual fields are shown. Error bars indicate±s.d. (B) Representative images of Tuj1 staining of MEFs infected with different genes or gene combinations. Scale bar, 100 μm. (C) Ngn1 and Ezh2 induced MEF neuron cells express MAP2, Tuj1 and NeuN, synapsin, and GABA 14 days after infection. Scale bar, 100 μm. (D) Bar graph showing the percentage of Tbr1-positive neurons (Tbr1+) and GABA-positive neurons (GABA+) out of total neurons. (E) Ngn1 and Ezh2 induced perinatal TTF neuron cells express MAP2, Tuj1 and NeuN, synapsin, and GABA 26 days after infection. Scale bar, 100 μm.

[0047] FIG. 21A-I shows that MEF-derived induced neurons show functional synaptic properties. (A) Recording electrode patched onto a sfGFP-positive cell with a stimulation electrode (middle panel). The right panel is a merged picture of BF and fluorescence images showing that the recorded cell is sfGFP-positive. (B) Representative traces of whole-cell currents in voltage-clamp mode; cells were held at −80 mV. Step depolarization from 70 mV to +40 mV at 10-mV intervals was delivered (lower panel). (C) Representative trace of evoked membrane potential by +40 pA current injection (lower panel) in current-clamp mode held at −75 mV. Application of 100 nM tetrodotoxin (TTX), a selective blocker of voltage-gated sodium channels, inhibited the action potential. (D) Inward sodium currents were evoked from an induced neurons, and application of 500 nM TTX inhibited these currents. Step depolarization from −70 mV to +60 mV at 10-mV intervals was delivered; cells were held at −80 mV (right panel); a presentative trace of whole-cell current with and without TTX at −10 mV membrane potential in voltage-clamp mode is shown (left panel). (E) Outward potassium currents were evoked from an induced neurons, and application of 5 mM tetraethylammonium (TEA) inhibited these currents. Step depolarization from −70 mV to +60 mV at 10-mV intervals was delivered; cells were held at −80 mV (right panel); a presentative trace of whole-cell current with and without TEA at +60 mV membrane potential in voltage-clamp mode is shown (left panel). (F) Spontaneous EPSCs were recorded from induced neurons. (G) Spontaneous action potentials recorded from an induced neuron (left panel). Application of 100 nM TTX blocked the action potentials (middle panel). Washout of TTX reversed the blockade (right panel). (1-) Representative traces of evoked excitatory spontaneous postsynaptic currents (EPSCs) recorded from an induced neuron (left panel). Application of 30 μM DNQX (6,7-dinitroquinoxaline-2,3-dione), an AMPA/kainate glutamate receptor antagonist, blocked the response of EPSCs (middle panel). Washout of DNQX reversed the blockade (right panel). (1) Representative traces of evoked EPSCs recorded from an induced neuron (left panel). Application of 30 μM BIC (Bicuculline), a GABA receptor antagonist, slightly increased the frequency and amplitude of EPSCs (middle panel). Washout of BIC reversed the increase (right panel). F, and H-I, Cells were recorded at a holding potential (Vh) of −60 mV. Error bars indicate±s.d. of cell counts. Scale bar, 10 μm.

[0048] FIG. 22A-E shows generation of the CRISPRa and CRISPRa knock-in cell lines. (A) A multiple lentiviral CRISPRa system. (B) Characterization of CamES cells for the morphology, expression of pluripotency marker Oct4, and expression of CRISPRa components. Scale bars, 100 μm. (C) Schematic of the clonal CamES cell line carrying a biallelic IRES-hCD8 insertion at the Tuj1 locus. (D) Sequencing results of the Tuj1 locus in Tuj1-hCD8 CamES cells. (E) Quantification by qPCR for neuronal markers Tuj1 and Map2 expression before and after MACS sorting.

[0049] FIG. 23A-G shows (A) Time line scheme of the neural differentiation screens using the sgRNA library in Tuj1-hCDS CamES cells. (B) Quantification of Tuj1 and Map2 mRNA expression levels in CamES cells, CamES cells +sgControl, and CamES cells +sgLibrary during differentiation. Error bars, s.d.±the mean of three independent experiments. (C) Staining of neural markers Tuj1 and Map2 in library-transduced Tuj1-hCD8 CamES cells. Scale bar, 100 μm. (D) Boxplot. of normalized sgRNA counts for the plasmid library, sorted Tuj1-hCD8+ cells, and sorted Tuj1-hCD8− cells. (E) The top ten enriched genes as calculated for Tuj1-hCD8+ relative to day 0, Tuj1-hCD8− relative to day 0, and Tuj1-hCD8+ relative to Tuj1-hCD8−. (F) Toy example of sgRNA stochastic representation in the screening system. (G) The percentage of screen hits in common with Tuj1-hCDS+/D0 for the Tuj1-hCD8−/D0, SSEA1+/D0, and Tuj1-hCD8+/Tuj1-hCD8− gene ranks at a given hit cutoff.

[0050] FIG. 24A-D shows (A) Quantification of PSA-NCAM+ cells were measured by flow cytometry in CamES cells transduced with three individual sgRNAs of each gene after 12-day differentiation. (B) Quantification of hCD8+ cells measured by flow cytometry in Tuj1-hCD8 CamES cells transduced without sgRNA, with 6 individual non-targeting sgRNAs, and with 19 individual sgRNAs after 12-day differentiation. Error bars represent standard deviation of three independent experiments. (C) Quantification of PSA-NCAM+ cells were measured at day 10 by flow cytometry in E14 cells after induction of different transgenes or negative control transgene BFP. Error bars represent standard deviation of three independent experiments. (D) Staining of various neuronal lineage markers (Tuj1, NeuN, Olig2, GFAP, GABA, and vGluT1) in CamES cells transduced with individual sgRNAs after 12-day differentiation. Scale bar, 100 μm.

[0051] FIG. 25 shows quantification of MAP2+ cells from MEFs infected with different genes.

[0052] FIG. 26A-E shows (A) The distribution of guides for the top 19 hits in green against an equal number of randomly selected negative control guides. (B) Variable gene effects and mixing proportions. (C) The estimated gene effect sizes plotted versus the estimated gene specific mixing proportions. (D) The estimated feature coefficients and their 80% credible interval from the model described in Example 4. (E) The distribution of average log 2 fold change of guides in the corresponding feature (top).

[0053] FIG. 27A-D shows (A) Cloning strategy for final two-guides vector. (B) Sequencing strategy to analyze the sgRNA sequences for the double sgRNA library. (C) Empirical Bayes fit of the null distribution of the constructed test statistic using the R package locfdr. (D) Correlation of sequenced sgRNA counts in library-transduced CamES cells at D0, Tuj1-hCD8+ cells and Tuj1-hCD8− cells after hCD8 sorting.

[0054] FIG. 28A-1H shows (A) Ngn1 and Foxo1 induced MEF neuron cells express MAP2, Tuj1 and NeuN, synapsin, and GABA 14 days after infection. Scale bar, 100 μm. (B) Bar graph showing the percentage of Tbr1-positive neurons (Tbr1+) and GABA-positive neurons (GABA+) out of total neurons. (C) Ngn1 and Foxo1 induced perinatal TTF neuron cells express MAP2, Tuj1, and NeuN, synapsin, and GABA 26 days after infection. Scale bar, 100 μm. (D) Inward sodium currents were evoked from induced neurons, and application of 500 nM TTX inhibited these currents. (E) Outward potassium currents were evoked from an induced neurons, and application of 5 mM tetraethylammonium (TEA) inhibited these currents. (F) Spontaneous action potentials recorded from an induced neuron (left panel). Application of 100 nM TTX blocked the action potentials (middle panel). Washout of TTX reversed the blockade (right panel). ((G) Representative traces of evoked excitatory spontaneous postsynaptic currents (EPSCs) recorded from an induced neuron (left panel). Application of 30 μM DNQX (6,7-dinitroquinoxaline-2,3-dione), an AMPA/kainate glutamate receptor antagonist, blocked the response of EPSCs (middle panel). Washout of DNQX reversed the blockade (right panel). (H) Representative traces of evoked EPSCs recorded from an induced neuron (left panel). Application of 30 μM BIC (Bicuculline), a GABA receptor antagonist, slightly increased the frequency and amplitude of EPSCs (middle panel). Washout of BIC reversed the increase (right panel). G and H, Cells were recorded at a holding potential (Vh) of −60 mV. Error bars indicate±s.d. of cell counts.

[0055] FIG. 29 shows representative images of Tuj1 staining of MEFs infected with different gene combinations. Scale bar, 100 μm.

### DEFINITIONS

[0056] As used herein the term “stem cell” (“SC”) refers to cells that can self-renew and differentiate into multiple lineages. A stem cell is a developmentally pluripotent or multipotent cell. A stem cell can divide to produce two daughter stem cells, or one daughter stem cell and one progenitor (“transit”) cell, which then proliferates into the tissue's mature, fully formed cells. Stem cells may be derived, for example, from embryonic sources (“embryonic stem cells”) or derived from adult sources. For example, U.S. Pat. No. 5,843,780 to Thompson describes the production of stem cell lines from human embryos. PCT publications WO 00/52145 and WO 01/00650 (herein incorporated by reference in their entireties) describe the use of cells from adult humans in a nuclear transfer procedure to produce stem cell lines.

[0057] Examples of adult stem cells include, but are not limited to, hematopoietic stem cells, neural stem cells, mesenchymal stem cells, and bone marrow stromal cells. These stem cells have demonstrated the ability to differentiate into a variety of cell types including adipocytes, chondrocytes, osteocytes, myocytes, bone marrow stromal cells, and thymic stroma (mesenchymal stem cells); hepatocytes, vascular cells, and muscle cells (hematopoietic stem cells); myocytes, hepatocytes, and glial cells (bone marrow stromal cells) and, indeed, cells from all three germ layers (adult neural stem cells).

[0058] As used herein, the term “totipotent cell” refers to a cell that is able to form a complete embryo (e.g., a blastocyst).

[0059] As used herein, the term “pluripotent cell” or “pluripotent stem cell” refers to a cell that has complete differentiation versatility, e.g., the capacity to grow into any of the mammalian body's approximately 260 cell types. A pluripotent cell can be self-renewing, and can remain dormant or quiescent within a tissue. Unlike a totipotent cell (e.g., a fertilized, diploid egg cell), a pluripotent cell, even a pluripotent embryonic stem cell, cannot usually form a new blastocyst.

[0060] As used herein, the term “induced pluripotent stem cells” (“iPSCs”) refers to a stem cell induced from a somatic cell, e.g., a differentiated somatic cell, and that has a higher potency than said somatic cell. iPS cells are capable of self-renewal and differentiation into mature cells.

[0061] As used herein, the term “multipotent cell” refers to a cell that has the capacity to grow into a subset of the mammalian body's approximately 260 cell types. Unlike a pluripotent cell, a multipotent cell does not have the capacity to form all of the cell types.

[0062] As used herein, the term “progenitor cell” refers to a cell that is committed to differentiate into a specific type of cell or to form a specific type of tissue.

[0063] As used herein, the term “embryonic stem cell” (“ES cell” or ESC”) refers to a pluripotent cell that is derived from the inner cell mass of a blastocyst (e.g., a 4- to 5-day-old human embryo), and has the ability to yield many or all of the cell types present in a mature animal.

[0064] As used herein the term “feeder cells” refers to cells used as a growth support in some tissue culture systems. Feeder cells may, for example, embryonic striatum cells or stromal cells.

[0065] As used herein, the term “chemically defined media” refers to culture media of known or essentially-known chemical composition, both quantitatively and qualitatively. Chemically defined media is free of all animal products, including serum or serum-derived components (e.g., albumin).

### DETAILED DESCRIPTION

[0066] Provided herein are compositions and methods for identifying and using stem cell differentiation regulation factors. For example, in some embodiments, provided herein are compositions and methods for identifying stem cell differentiation regulation factors using marker gene expression libraries. Also provided herein are compositions and methods for generating differentiated and induced cells lines and uses of such cell lines.

[0067] The RNA-guided microbial endonuclease CRISPR (clustered regularly interspaced short palindromic repeat)/Cas9 (CRISPR associated protein 9) system was recently repurposed as a tool for sequence-specific gene editing and transcriptional regulation (Cho et al., 2013 Nat. Biotechnol. 31, 230-232; Cong et al., 2013 Science 339, 819-823; Fu et al., 2014 Nat. Biotechnol. 32, 279-284; Jinek et al. Science 337, 816-821, 2012; Mali et al., 2013b Science 339, 823-826; Qi et al., 2013 Cell 152, 1173-1183; Ran et al., 2015 Nature 520, 186-191; Yu et al., 2015 Cell Stem Cell 16, 142-147). The nuclease-dead Cas9 (dCas9) fused with transcription activator domains allows endogenous genes activation, leading to CRISPR activation (CRISPRa) methods (Chavez et al., 2015 Nat. Method. 12, 326-328; Cheng et al., 2013 Cell Res. 23, 1163-1171; Gilbert et al., 2013 Cell 154, 442-451; Hilton et al., 2015 Nat. Biotechnol. 33, 510-517; Konermann et al., 2015 Nature 517, 583-588; Maeder et al., 2013 Nat. Method. 10, 977-979; Mali et al., 2013a Nat. Biotechnol. 31, 833-838; Perez-Pinera et al., 2013 Nat. Method. 10, 973-976; Tanenbaum et al., 2014 Cell 159, 635-646; Zalatan et al., 2015 Cell 160, 339-350). Previous work demonstrated that CRISPR activation of endogenous genes allowed, in principle, somatic cell reprogramming and directed cell differentiation (Black et al., 2016 Cell Stem Cell 19, 406-414; Chakraborty et al., 2014 Stem Cell Reports 3, 940-947; Chavez et al., 2015 Nat. Method. 12, 326-328; Wei et al., 2016 Sci. Rep. 6, 19648). However, since these studies relied on using a mixture of multiple sgRNAs for activating a single gene and inducing differentiation, applying these methods for large-scale activation screening has been a major challenge.

[0068] Unlike cell growth phenotypes that entail a dropout live-or-dead process, cell fate determination is a dynamic, stochastic process that often generates a heterogeneous cell population with diverse phenotypes (e.g., non-dropout) (Hanna et al., 2009 Nature 462, 595-601; Johnston and Desplan, 2010 Annu. Rev. Cell Dev. Biol. 26, 689-719). This imposes another challenge to simply perform dropout screens that distinguish lineage specification processes from spontaneous differentiation events. Furthermore, because developmental programs are highly dependent on the expression level of endogenous genes (Niwa et al., 2000 Nat. Genet. 24, 372-376; Papapetrou et al., 2009 Proc. Natl. Acad. Sci. USA 106, 12759-12764), gain-of-function screens that allow very efficient gene activation (comparable to cDNA overexpression) while covering a broad range of expression offer more promise for identifying candidate genes driving cell lineages. To date, two reports used CRISPRa for cell growth-based dropout screens (Gilbert et al., 2014 Cell 159, 647-661; Konermann et al., 2015 Nature 517, 583-588). However, the application of CRISPRa screens for the systematic inference of cell fate determination has not yet been established.

[0069] Experiments described herein overcame these challenges by developing a CRISPR activation (CRISPRa)-mediated gain-of-function screening approach to identify transcription factors (TFs) important for stem cell fate determination. An enhanced CRISPRa system was developed in mouse embryonic stem (ES) cells that efficiently activates endogenous genes and drives cell lineage differentiation. A single sgRNA was sufficient to induce neuron or muscle differentiation. Based on the system, a large-scale sgRNA library (>50,000 sgRNA) was used to target all putative endogenous TF genes (˜800) and a small set of noncoding RNA genes (50). Targeting a single gene using multiple sgRNAs (>60 sgRNA per gene) allowed activating each gene to a broad range of expression levels. A CRISPRa dropout screen was used to identify genes that promote stem cell self-renewal, as well as a non-dropout screen for inducing neural differentiation. The top gene hits were validated using individual sgRNAs, and it was observed that all hits could maintain self-renewal. For neural differentiation, it was confirmed that 19 out of top 20 gene hits could induce efficient neural differentiation. For both screens, the lists of gene hits include known TF factors and those TFs and noncoding RNAs that are not previously related to self-renewal maintenance or neural differentiation. Different identified TFs preferentially induced different types of neurons. Deep sequencing and functional analysis of a few gene hits (Mlxip for self-renewal and Jun for neural differentiation) confirmed their functions for driving desired cellular processes.

[0070] Thus, the compositions and methods provide herein allow for the identification of the relevant factors necessary, sufficient, and/or useful for controlling differentiation of stem cells into any desired fat. The transcription factors identified herein and identifiable using the compositions and methods described herein provide target and reagents for differentiation of cells an provide the cells made therefrom that find use as research tools, drug screening targets, and therapeutics (e.g., via cell transplantation into a host).

[0071] The CRISPRa gain-of-function screens and stem cell libraries described herein find use in research, therapeutic, and screening applications to determine differentiation factors for a variety of stem cells. The differentiation factors identified further find use in stem cell differentiation for research, screening, and clinical applications.

### 1. Identification of Differentiation Factors

[0072] As described herein, embodiments of the present disclosure provide compositions and methods for identifying stem cell differentiation regulation factors. In some embodiments, the methods utilize a modified pluripotent or multipotent (e.g., stem cell) line. The present disclosure is not limited to particular cell lines. Examples include, but are not limited iPSC, embryonic stem cells, adult stem cells, and the like.

[0073] In some embodiments, the CRISPR activation system comprises a dCas9 construct under the transcriptional control of a first promoter. In some embodiments, the dCas9 is fused to a peptide epitope. In some embodiments, the activation system further comprises a VP64 transactivation domain under the transcriptional control of a second promoter. In some embodiments, the VP64 transactivation domain is fused to a peptide that specifically binds to the peptide epitope. In some embodiments, the activation system further comprises a selection marker under the transcriptional control of a third promoter. In some embodiments, each of the first, second, and third promoters are different than each other.

[0074] In some embodiments, cell lines for determination of differentiation regulation factors are pluripotent cells modified with a dead Cas9/transactivator activation system. For example in some embodiments, cells comprise a nuclease dead Cas9 (dCas9). In some embodiments, the dCas9 is fused to a signal activation component (e.g., a plurality of peptide epitopes as described in Tanenbaum et al., (2014). Cell 159, 635-646; herein incorporated by reference in its entirety). In some embodiments, the cell lines further comprise a single chain variable chain antibody fragment specific for the peptide epitope fused to a tranactivator domain (e.g., VP64; See e.g., Beerli et al., Proc Natl Acad Sci USA. 1998 Dec 8; 95(25): 14628-14633; herein incorporated by reference in its entirety) and a transactivator polypeptide. In some embodiments, the activation components are provided on a vector (e.g., retroviral vector, adenoviral viral vector, adeno-associated vector, lentiviral vector, etc.). In some embodiments, cells further overexpress endogenous Brn2 (e.g., via an sgRNA that targets activation of Brn2).

[0075] In some embodiments, the cells lines are next contacted with a plurality of sgRNAs (e.g., targeting cell differentiation regulation factors). In some embodiments, sgRNAs target transcription factors or non-coding RNAs (e.g., lincRNAs). In some embodiments, more than one (e.g., at least 10, 20, 30, 40, 50, 60, 70, 80, 90, or 100) sgRNAs specific for each differentiation factor are utilized. In some embodiments, sgRNAs are provided on vectors (e.g., retroviral vector, adenoviral viral vector, adeno-associated vector, lentiviral vector, etc.). In some embodiments, cells are further contacted with a plurality of non-targeting sgRNAs (e.g., to serve as negative controls). In some embodiments, a double CRISPR screen is performed using dual-sgRNA-constructs comprising two (or more) sgRNAs to screen for interactions between multiple cell differentiation factors in combination.

[0076] In some embodiments, the method further comprises contacting the cell differentiation factors with a fibroblast or other cell line and identifying cell differentiation factors that promote transdifferentiation of the fibroblast cell line. In some embodiments, the fibroblast cell line is contacted with combinations of two or more cell differentiation factors. In some embodiments, the cell differentiation factors that promote differentiation are combinations of Ngn1+Brn2, Ezh2+Brn2, Mecom+Ezh2, Ngn1+Ezh2, or Ngn1+Foxo1.

[0077] In some embodiments, the method comprises or further comprises the step of performing a CRISPR gene repression screen. For example, in some embodiments, the CRISPR repression screen comprises: a) contacting a pluripotent cell that expresses dCas9 fused to a transcription repressor domain (e.g., KRAB) with a plurality of sgRNAs specific for repression of a plurality of cell differentiation factors; b) sorting the library to identify cells that retain pluripotency or differentiate; and c) identifying cell differentiation factors that induce or prevent differentiation of said pluripotent cells. In some embodiments, the CRISPR repression screen and the CRISPR activation screen are performed in the same or different pluripotent cells. In some embodiments, the CRISPR repression screen and the CRISPR activation screen are performed simultaneously using vectors comprising a first sgRNA specific for activation of a first cell differentiation factor and a second sgRNA specific for repression of a second cell differentiation factor.

[0078] The resulting gene activation library from CRISPR activation and/or repressor cells are then further analyzed as described below. For example, in some embodiments, following delivery of sgRNAs, cells are cultured and cells that retain pluripotency or differentiate are identified. In some embodiments, cells are sorted based on the presence or absence of differentiation or pluiptency markers.

[0079] In some embodiments, in order to identify regulation factors for pluipotency, cells are cultured under conditions that do not inhibit differentiation (e.g., in media lacking inhibitors of GSK3 and ERK pathways). In some embodiments, pluripotent cells are sorted by identifying and selecting (e.g., using flow cytometry) cells that express SSEA1 after culture.

[0080] In some embodiments, cells that differentiate are identified by sorting for cells that express differentiation markers specific to the final cell type. For example, in some embodiments, cells that differentiate into neuronal cells are identified by sorting for cells that express Tuj1.

[0081] In some embodiments, cell differentiation factors are activated and analyzed in pairs or groups (e.g., as described in Example 2 below) in order to identify combined effects of between different factors.

[0082] In some embodiments, after selection, cell differentiation regulation factors are identified by identifying sgRNAs that persist in the sorted cells. In some embodiments, sequencing (e.g., deep sequencing) is used to identify sgRNAs. In some embodiments, sequencing methods further comprises comparing the level of said sgRNAs to the level of non-targeting sgRNAs.

[0083] In deep sequencing, a high number of replicates of each sequencing read (e.g., at least 10, 20, 30, 40, 50, or 100) are used to improve accuracy. The present disclosure is not limited to a particular sequencing technique. Exemplary sequencing techniques are described below. A variety of nucleic acid sequencing methods are contemplated for use in the methods of the present disclosure including, for example, chain terminator (Sanger) sequencing, dye terminator sequencing, and high-throughput sequencing methods. Many of these sequencing methods are well known in the art. See, e.g., Sanger et al., Proc. Natl. Acad. Sci. USA 74:5463-5467 (1997); Maxam et al., Proc. Natl. Acad. Sci. USA 74:560-564 (1977); Drmanac, et al., Nat. Biotechnol. 16:54-58 (1998); Kato, Int. J. Clin. Exp. Med. 2:193-202 (2009); Ronaghi et al., Anal. Biochem. 242:84-89 (1996); Margulies et al., Nature 437:376-380 (2005); Ruparel et al., Proc. Natl. Acad. Sci. USA 102:5932-5937 (2005), and Harris et al., Science 320:106-109 (2008); Levene et al., Science 299:682-686 (2003); Korlach et al., Proc. Natl. Acad. Sci. USA 105:1176-1181 (2008); Branton et al., Nat. Biotechnol. 26(10):1146-53 (2008); Eid et al., Science 323:133-138 (2009); each of which is herein incorporated by reference in its entirety.

[0084] Next-generation sequencing (NGS) methods share the common feature of massively parallel, high-throughput strategies, with the goal of lower costs in comparison to older sequencing methods (see, e.g., Voelkerding et al., Clinical Chem., 55: 641-658, 2009; MacLean et al., Nature Rev. Microbiol., 7: 287-296; each herein incorporated by reference in their entirety). NGS methods can be broadly divided into those that typically use template amplification and those that do not. Amplification-requiring methods include pyrosequencing commercialized by Roche as the 454 technology platforms (e.g., GS 20 and GS FLX), the Solexa platform commercialized by illumina, and the Supported Oligonucleotide Ligation and Detection (SOLiD) platform commercialized by Applied Biosystems. Non-amplification approaches, also known as single-molecule sequencing, are exemplified by the HeliScope platform commercialized by Helicos BioSciences, and emerging platforms commercialized by VisiGen, Oxford Nanopore Technologies Ltd., Life Technologies/Ion Torrent, and Pacific Biosciences, respectively.

[0085] Other emerging single molecule sequencing methods include real-time sequencing by synthesis using a VisiGen platform (Voelkerding et al., Clinical Chem., 55: 641-58, 2009; U.S. Pat. No. 7,329,492; U.S. patent application Ser. No. 11/671,956; U.S. patent application Ser. No. 11/781,166; each herein incorporated by reference in their entirety) in which immobilized, primed DNA template is subjected to strand extension using a fluorescently-modified polymerase and florescent acceptor molecules, resulting in detectible fluorescence resonance energy transfer (FRET) upon nucleotide addition.

[0086] Exemplary cell regulation factors indicative of cells that retain pluripotency or differentiate are described in the Figures and Tables herein. For example, in some embodiments, cell transcription factors that retain pluripotency are one or more of the regulation factors shown in FIG. 3 or Table 3 and cell differentiation factors that are associated with differentiation into neuronal cells are one or more of the regulation factors shown in FIG. 6 or Table 4.

[0087] The cell differentiation factors identified using the described methods find use in a variety of applications. Exemplary uses are described herein.

### II. Cell Lines and Libraries and Uses Thereof

[0088] In some embodiments, the present disclosure provides cells lines, kits, and systems for use in the described methods. For example, in some embodiments, provided herein are libraries of modified pluripotent cells as described above. For example, in some embodiments, the cells comprise a dCas9 construct under the transcriptional control of a first promoter. In some embodiments, the dCas9 is fused to a peptide epitope. In some embodiments, the cells comprise a VP64 transactivation domain under the transcriptional control of a second promoter. In some embodiments, the VP64 transactivation domain is fused to a peptide that specifically binds to the peptide epitope. In some embodiments, the cells comprise a selection marker under the transcriptional control of a third promoter. In some embodiments, each of the first, second, and third promoters are different than each other.

[0089] In some embodiments, cells express i) nuclease dead Cas9 fused to a plurality of peptide epitopes; ii) a single chain variable chain antibody fragment specific for said peptide epitope fused to a VP64 tranactivator domain; and iii) a transactivator polypeptide.

[0090] In some embodiments, the cell lines described herein find use in screening (e.g., drug screening) and research applications as described below.

[0091] In some embodiments, provided herein are kits and systems comprising the cell lines described herein. In some embodiments, kits and systems further comprise a plurality of sgRNAs specific for activation of pluripotent cell differentiation factors. In some embodiments, the kit or system comprises one or more sgRNAs (e.g., 10 or more, 100 or more, 1000 or more, or 5000 or more) described in Table 13 (e.g., SEQ ID NOs:586-8317).

[0092] In some embodiments, kits and systems further comprise reagents for analysis of one or more properties of the cell lines (e.g., pluripotency or differentiation), reagents for sequencing the cells to identify the presence of sgRNAs, reagents for further downstream analysis (e.g., molecular analysis, toxicity screening, drug screening, or cellular activity assays), or computer software and computer systems for analyzing data.

### III. Differentiation Methods

[0093] In some embodiments, the present disclosure provides compositions and methods for differentiating cells into multipotent or specific cell types. The present disclosure is not limited to particular target cell types. Examples include, but are not limited to, epithelial cells (e.g., exocrine secretory epithelial cells, hormone secreting cells (e.g., islet cells), keratinizing epithelial cells (e.g., skin cells), central nervous system cells (e.g., neuronal cells), blood cells, and organ cells.

[0094] In some embodiments, differentiation is induced by increasing expression of cellular regulation factors identified using the methods described herein. In some embodiments, expression is induced by exogenously introduced differentiation genes. In one embodiment, the exogenously introduced gene may be expressed from a chromosomal locus different from the endogenous chromosomal locus of the gene. Such chromosomal locus may be a locus with open chromatin structure, and contain gene(s) dispensible for a somatic cell. In other words, the desirable chromosomal locus contains gene(s) whose disruption will not cause cells to die. Exemplary chromosomal loci include, for example, the mouse ROSA 26 locus and type II collagen (Col2a1) locus (See Zambrowicz et al., 1997) The exogenously introduced pluripotency gene may be expressed from an inducible promoter such that their expression can be regulated as desired.

[0095] In some embodiments, the exogenously introduced gene is transiently transfected into cells, either individually or as part of a cDNA expression library. The cDNA library is prepared by conventional techniques. Briefly, mRNA is isolated from an organism of interest. An RNA-directed DNA polymerase is employed for first strand synthesis using the mRNA as template. Second strand synthesis is carried out using a DNA-directed DNA polymerase which results in the cDNA product. Following conventional processing to facilitate cloning of the cDNA, the cDNA is inserted into an expression vector such that the cDNA is operably linked to at least one regulatory sequence. The choice of expression vectors for use in connection with the cDNA library is not limited to a particular vector. Any expression vector suitable for use in mammalian cells is appropriate. In one embodiment, the promoter which drives expression from the cDNA expression construct is an inducible promoter. The term regulatory sequence includes promoters, enhancers and other expression control elements. Exemplary regulatory sequences are described in Goeddel: Gene Expression Technology: Methods in Enzymology, Academic Press, San Diego, Calif. (1990). For instance, any of a wide variety of expression control sequences that control the expression of a DNA sequence when operatively linked to it may be used in these vectors to express cDNAs. It should be understood that the design of the expression vector may depend on such factors as the choice of the host cell to be transformed and/or the type of protein desired to be expressed. Moreover, the vector's copy number, the ability to control that copy number and the expression of any other protein encoded by the vector, such as antibiotic markers, should also be considered.

[0096] In some embodiments, the CRISPR activation and/or repression system is expressed from an inducible promoter. The term “inducible promoter”, as used herein, refers to a promoter that, in the absence of an inducer (such as a chemical and/or biological agent), does not direct expression, or directs low levels of expression of an operably linked gene (including cDNA), and, in response to an inducer, its ability to direct expression is enhanced, Exemplary inducible promoters include, for example, promoters that respond to heavy metals (CRC Boca Raton, Fla. (1991), 167-220; Brinster et al. Nature (1982), 296, 39-42), to thermal shocks, to hormones (Lee et al. P.N.A.S. USA (1988), 85, 1204-1208; (1981), 294, 228-232; Klock et al. Nature (1987), 329, 734-736; Israel and Kaufman, Nucleic Acids Res. (1989), 17, 2589-2604), promoters that respond to chemical agents, such as glucose, lactose, galactose or antibiotic.

[0097] A tetracycline-inducible promoter is an example of an inducible promoter that responds to an antibiotics. See Gossen et al., 2003. The tetracycline-inducible promoter comprises a minimal promoter linked operably to one or more tetracycline operator(s). The presence of tetracycline or one of its analogues leads to the binding of a transcription activator to the tetracycline operator sequences, which activates the minimal promoter and hence the transcription of the associated cDNA and the expression of CRISPR activation and/or repression system. Tetracycline analogue includes any compound that displays structural homologies with tetracycline and is capable of activating a tetracycline-inducible promoter. Exemplary tetracycline analogues includes, for example, doxycycline, chlorotetracycline and anhydrotetracycline.

[0098] In some embodiments, expression of cell differentiation factors is induced via activating sgRNAs as described herein (e.g., Example 1). One or more sgRNAs are introduced into a pluripotent cell that expresses a CRISPR activation system (e.g., those described herein or other suitable system).

[0099] In some embodiments, differentiation is induced via small molecules that active expression or activity of cell differentiation genes or downstream signaling partners.

[0100] In some embodiments, cells are cultured under conditions that promote differentiation. In some embodiments, cultures are adherent cultures, e.g., the cells are attached to a substrate. The substrate is typically a surface in a culture vessel or another physical support, e.g. a culture dish, a flask, a bead or other carrier. In some embodiments, the substrate is coated to improve adhesion of the cells and suitable coatings include laminin, poly-lysine, poly-ornithine and gelatin. In some embodiments, the cells are grown in a monolayer culture or in suspension or as balls or clusters of cells. At higher densities, cells may begin to pile up on each other, but the cultures are essentially monolayers or begin as monolayers, attached to the substrate.

[0101] Cells differentiated using the methods described herein find use in a variety of research, screening, and clinical applications. In some embodiments, cells are used to prepare antibodies and cDNA libraries that am specific for the differentiated phenotype. General techniques used in raising, purifying and modifying antibodies, and their use in immunoassays and immunoisolation methods are described in Handbook of Experimental Immunology (Weir & Blackwell, eds.), Current Protocols in Immunology (Coligan et al., eds.); and Methods of Immunological Analysis (Masseyeff et al., eds., Weinheim: VCH Verlags GmbH). General techniques involved in preparation of mRNA and cDNA libraries are described in RNA Methodologies: A Laboratory Guide for Isolation and Characterization (R. E. Farrell, Academic Press, 1998); cDNA Library Protocols (Cowell & Austin, eds., Humana Press); and Functional Genomics (Hunt & Livesey, eds., 2000). Relatively homogeneous cell populations are particularly suited for use in drug screening and therapeutic applications.

[0102] In some embodiments, the cells generated by methods provided herein or the above-described cell lines are used to screen for agents (e.g., small molecule drugs, peptides, polynucleotides, and the like) or environmental conditions (such as culture conditions or manipulation) that affect the cells. Particular screening applications relate to the testing of pharmaceutical compounds in drug research. Assessment of the activity of candidate pharmaceutical compounds generally involves combining the cells with the candidate compound, determining any change in the morphology, marker phenotype, or metabolic activity of the cells that is attributable to the compound (compared with untreated cells or cells treated with an inert compound), and then correlating the effect of the compound with the observed change. Any suitable assays for detecting changes associated with test agents may find use in such embodiments. The screening may be done, for example, either because the compound is designed to have a pharmacological effect on specific cell types, because a compound designed to have effects elsewhere may have unintended side effects, or because the compound is part of a library screen for a desired effect. Two or more drugs can be tested in combination (by combining with the cells either simultaneously or sequentially), to detect possible drug-drug interaction effects. In some applications, compounds are screened for cytotoxicity.

[0103] In some embodiments, methods and systems are provided for assessing the safety and efficacy of drugs that act upon the differentiated cells, or drugs that might be used for another purpose but may have unintended effects upon the cells. In some embodiments, cells described herein find use in high throughput screening (ITS) applications. In some embodiments, a HTS screening platform is provided (e.g., cells and plates) that allows for the rapid testing of large number (e.g., 1×10³, 1×10⁴, 1×10⁵, 1×10⁶ (or more) of agents (e.g., small molecule compounds, peptides, etc.).

[0104] In some embodiments cells generated using methods and reagents described herein are utilized for therapeutic delivery to a subject (e.g., a subject with a disease or other condition). Cells may be placed directly in contact with subject tissue or may be otherwise sealed or encapsulated (e.g., to avoid direct contact). In embodiments in which cells are encapsulated, exchange of factors, nutrients, gases, etc. between the encapsulated cells and the subject tissue is allowed. In some embodiments, cells are implanted/transplanted on a matrix or other delivery platform.

[0105] If appropriate, cells are co-administered with one or more pharmaceutical agents or bioactives that facilitate the survival and function of the transplanted cells.

[0106] Support materials suitable for use for purposes of the present disclosure include tissue templates, conduits, barriers, and reservoirs useful for tissue repair. In particular, synthetic and natural materials in the form of foams, sponges, gels, hydrogels, textiles, and nonwoven structures, which have been used in vitro and in vivo to reconstruct or regenerate biological tissue, as well as to deliver chemotactic agents for inducing tissue growth, are suitable for use in practicing the methods of the present disclosure. See, for example, the materials disclosed in U.S. Pat. Nos. 5,770,417, 6,022,743, 5,567,612, 5,759,830, 6,626,950, 6,534,084, 6,306,424, 6,365,149, 6,599,323, 6,656,488, U.S. Published Application 2004/0062753 A1, U.S. Pat. Nos. 4,557,264 and 6,333,029.

[0107] Cells generated with methods and reagents herein may be implanted as dispersed cells or formed into implantable clusters. In some embodiments, cells are provided in biocompatible degradable polymeric supports; porous, permeable, or semi-permeable non-degradable devices; or encapsulated (e.g., to protect implanted cells from host immune response, etc.). Cells may be implanted into an appropriate site in a recipient. Suitable implantation sites depend on the cell type and may include, for example, the brain, spinal cord, skin, liver, natural pancreas, renal subcapsular space, omentum, peritoneum, subserosal space, intestine, stomach, or a subcutaneous pocket.

[0108] In some embodiments, cells or cell clusters are encapsulated for transplantation into a subject. Encapsulation techniques are generally classified as microencapsulation, involving small spherical vehicles, and macroencapsulation, involving larger flat-sheet and hollow-fiber membranes (Uludag, H. et al. Technology of mammalian cell encapsulation. Adv Drug Deliv Rev. 2000; 42: 29-64, herein incorporated by reference in its entirety).

[0109] Methods of preparing microcapsules include those disclosed by Lu M Z, et al. Biotechnol Bioeng. 2000, 70: 479-83; Chang T M and Prakash S, Mol Biotechnol. 2001, 17: 249-60; and Lu M Z, et al., J. Microencapsul. 2000, 17: 245-51; herein incorporated by reference in their entireties. For example, microcapsules may be prepared by complexing modified collagen with a ter-polymer shell of 2-hydroxyethyl methylacrylate (HEMA), methacrylic acid (MAA) and methyl methacrylate (MMA), resulting in a capsule thickness of 2-5 μm. Such microcapsules can be further encapsulated with additional 2-5 μm ter-polymer shells in order to impart a negatively charged smooth surface and to minimize plasma protein absorption (Chia, S. M. et al. Multi-layered microcapsules for cell encapsulation Biomaterials. 2002 23: 849-56; herein incorporated by reference in its entirety). In some embodiments, microcapsules are based on alginate, a marine polysaccharide (Sambanis. Diabetes Technol. Ther. 2003, 5: 665-8; herein incorporated by reference in its entirety) or its derivatives. For example, microcapsules can be prepared by the polyelectrolyte complexation between the polyanions sodium alginate and sodium cellulose sulphate with the polycation poly(methylene-co-guanidine) hydrochloride in the presence of calcium chloride.

[0110] In some embodiments, cells generated using methods and reagents described herein are microencapsulated for transplantation into a subject (e.g., to prevent immune destruction of the cells). Microencapsulation of cells provides local protection of implanted/transplanted cells from immune attack (e.g., along with or without the use of systemic immune suppressive drugs). In some embodiments, cells and/or cell clusters are microencapsulated in a polymeric, hydrogel, or other suitable material, including but not limited to: poly(orthoesters), poly(anhydrides), poly(phosphoesters), poly(phosphazenes), polysaccharides, polyesters, poly(lactic acid), poly(L-lysine), poly(glycolic acid), poly(lactic-co-glycolic acid), poly(lactic acid-co-lysine), poly(lactic acid-graft-lysine), polyanhydrides, poly(fatty acid dimer), poly(fumaric acid), poly(sebacic acid), poly(carboxyphenoxy propane), poly(carboxyphenoxy hexane), poly(anhydride-co-imides), poly(amides), poly(ortho esters), poly(iminocarbonates), poly(urethanes), poly(organophasphazenes), poly(phosphates), poly(ethylene vinyl acetate), poly(caprolactone), poly(carbonates), poly(amino acids), poly(acrylates), polyacetals, poly(cyanoacrylates), poly(styrenes), poly(vinyl chloride), poly(vinyl fluoride), poly(vinyl imidazole), chlorosulfonated polyolefins, polyethylene oxide, polystyrene, polysaccharides, alginate, hydroxypropyl cellulose (HPC), N-isopropylacrylamide (NIPA), polyethylene glycol, polyvinyl alcohol (PVA), polyethylenimine, chitosan (CS), chitin, dextran sulfate, heparin, chondroitin sulfate, gelatin, etc., and their derivatives, co-polymers, and mixtures thereof. In some embodiments, cells are microencapsulated in an encapsulant comprising or consisting of alginate. Cells may be embedded in a material or within a particle (e.g., nanoparticle, microparticle, etc.) or other structure (e.g., matrix, nanotube, vesicle, globule, etc.). In some embodiments, microencapsulating structures are modified with immune-modulating or immunosuppressive compounds to reduce or prevent immune response to encapsulated cells. For example, in some embodiments, cells are encapsulated within an encapsulant material (e.g., alginate hydrogel) that has been modified by attachment of an immune-modulating agent (e.g., the immune modulating chemokine, CXCL12 (also known as SDF-1). In some embodiments, such an immune modulating agent is a T-cell chemorepellent and/or a pro-survival factor.

[0111] In some embodiments, cells generated using methods and reagents described herein are macroencapsulated for transplantation into a subject. Macroencapsulation of cells, for example, within a permeable or semi-permeable chamber, provides local protection of implanted/transplanted cells from immune attack (e.g., along with or without the use of systemic immune suppressive drugs), prevents spread of cells to other tissues or areas of the body, and/or allows for efficient removal of cells. Suitable devices for macroencapsulation include those described in, for example, U.S. Pat. No. 5,914,262; Uludag, et al., Advanced Drug Delivery Reviews, 2000, pp. 29-64, vol. 42, herein incorporated by reference in their entireties.

[0112] Other encapsulation (micro or macro) devices and methods may find use in embodiments described herein. For example, methods and devices described in U.S. Pub No. 20130209421, U.S. Pat. No. 8,785,185, each of which are herein incorporated by reference in their entireties, are within the scope of embodiments described herein.

### IV. Differentiation Factors

[0113] As described above and in the examples below, a number of new transcription factor and other regulatory factors involved in the regulating the differentiation processes have been discover using the screening methods described herein. These factors find use in generating stem cells or differentiated cells have desired properties for use in research, drug screening, and therapeutic applications.

[0114] In some embodiments, individual or combinations of these factors are used to induce differentiation in a stem cell to obtain differentiated cells or multipotent cells of a particular lineage (e.g., neural stem cells). In some embodiments, such factor are introduced exogenously to stem cells in vitro or in vivo (e.g., via expression vector, etc). In some embodiments, endogenous factors are up or down regulated by providing activators or inhibitors of endogenous expression.

[0115] In some embodiments, individual or combinations of these factors are used to induce differentiation in a somatic cell (e.g., fibroblast, neuronal cell, etc).

[0116] In some embodiments, individual or combinations of these factors are used to maintain or induce pluripotency in a cell line. In some embodiments, such factor are introduced exogenously to stem cells or somatic cells in vitro or in vivo (e.g., via expression vector, etc). In some embodiments, endogenous factors are up or down regulated by providing activators or inhibitors of endogenous expression.

[0117] In some embodiments, one or more of the markers described in Tables 3 and 4 are targeted. In some embodiments, provided herein are one or more sgRNAs (e.g., 10 or more, 100 or more, 1000 or more, or 5000 or more) described in Table 13 (e.g., SEQ ID NOs:586-8317) for use in targeting the described markers.

[0118] In some embodiments, provided herein are cell generated by such methods and the use of such cells, for example, in drug screening, diagnostic, and therapeutic indications.

[0119] Where transcription factors are introduced as peptides, in some embodiments they are complexed with cell membrane permeable peptides (e.g., Tat protein, penetratin, etc.) to facilitate entry into target cells.

### EXPERIMENTAL

### Example 1

### CRISPR Activation Screens Identify Genes Promoting Self-Renewal and Neuronal Differentiation of Stem Cells

### Methods

[0120] sgRNA Library Construction

[0121] The oligo library was PCR amplified, gel purified and ligated to the linearized backbone vector (pSLQ1373) digested with BstXI and BlpI using In-Fusion cloning (Clontech).

[0122] Cell Culture

[0123] E14 mouse ES cells and CamES cells were maintained on gelatin coated tissue culture plates with basal medium (50% Neurobasal, 50% Dulbecco modified Eagle medium (DMEM) Ham's nutrient mixture F12, 0.5% NEAA, 0.5% Sodium Pyruvate, 0.5% GlutaMax, 0.5% N2, 1% B27, 0.1 mM β-mercaptoethanol and 0.05 g/L bovine albumin fraction V; all from Thermo Fisher Scientific) supplemented with LIF (Millipore) and 2i (Stemgent), Human embryonic kidney (HEK293T) cells (ATCC) were cultured in 10% fetal bovine serum (Thermo Fisher Scientific) in DMEM (Thermo Fisher Scientific).

[0124] Lentiviral Production

[0125] HEK293T cells were seeded at ˜30% confluence one day before transfection. Lentivirus were produced by cotransfecting with pHR plasmids and encoding packaging protein vectors (pMD2.G and pCMV-dR8.91) using TransIT-LT1 transfection reagents (Mirus). Viral supernatants were collected 3 days after transfection and filtered through 0.45 μm strainer. Supernatant was used for transduction immediately or kept at −80° C. for long-term storage.

[0126] High-Throughput Pooled Screening

[0127] Screens were performed in two independent replicates for both self-renewal and neural differentiation. For both screens, 10⁸ CamES cells were transduced with the pooled lentiviral library with an MOI of 0.3, treated with puromycin, and cultured in specified medium. After a period of time indicated for each screen, cells were harvested and FACS/MACS sorted. Deep sequencing was performed to profile the sgRNA counts in each sample, and computationally analyzed to infer top sgRNA and gene hits.

[0128] Plasmid Design and Construction

[0129] To clone sgRNA vectors, the optimized sgRNA expression vector (pSLQ1373) was linearized and gel purified (Chen et al., 2013 Cell 155, 1479-1491). New sgRNA sequences were PCR amplified from pSLQ1373 using different forward primers and a common reverse primer, gel purified and ligated to the linearized pSLQ1373 vector using In-Fusion cloning (Clontech). Primers used to construct individual sgRNAs are shown in Table 1. To change the promoter of scFv-sfGFP-VP64, the EF1α and PGK promoters were PCR amplified, gel purified, and ligated to linearized pSLQ1504 using In-Fusion cloning (Clontech).

[0130] sgRNA Library Design

[0131] Putative transcription factor (TF) genes were selected according to the TRANSFAC database, and TSS (transcription start site) for each gene was determined using the Gencode and refFlat databases. All possible transcripts were selected if multiple TSSs existed for a gene. All sgRNAs targeting was −3 kb to 0 relative to TSS. Using the CRISPR-era algorithm (Liu et al., 2015 Bioinformatics 31, 3676-3678), the targeting sequences of sgRNAs adjacent to an NGG PAM (protospacer adjacent motif) were computed, starting with a G (for more efficient U6 promoter activity) with a length of 20 bp. The sgRNAs containing homopolymers spanning greater than 3 nucleotides (nt) were discarded. To avoid off-target effects, sgRNA sequences alignment to the mouse genome was computed using the short read aligner Bowtie, and those with less than 2 mismatches with another genomic region were excluded. Furthermore, sgRNA sequences that contained certain restriction sites (BstXI and XhoI) were also removed. sgRNAs with a GC content between 30% and 70% were used. An average of about 60 sgRNAs were selected for each target gene. Sequences for non-targeting negative control sgRNAs were generated using a randomized mouse gene TSS region and selected using the same rules as described above.

[0132] sgRNA Library Construction

[0133] The oligonucleotide pool was synthesized by Custom Array. The oligo library was PCR amplified, gel purified and ligated to the linearized pSLQ1373 digested with BstXI and BlpI using in-Fusion cloning.

[0134] Construction of the CamES Cell Line

[0135] Mouse ES cells were co-transduced with multiple lentiviral constructs that expressed dCas9-SunTag from a TRE3G promoter, scFV-sfGFP-VP64 from the EF1a or PGK promoter, and rtTA from the EF1a promoter. After adding Doxycycline, polyclonal cells were sorted by flow cytometry using a BD FACS Aria2 for GFP+ and mCherry+ cells. After verification of gene activation using a sgBrn2, monoclonal cells were further sorted, and one efficient cell line was selected as CamES cells.

[0136] Construction of the Tuj-1-hCD8 CamES Cell Line

[0137] Construction of CRISPR/Cas9 vector for Tuj1 knockin. The pX330-derived pSLQ1654 encoding the nuclease Cas9 and an optimized sgRNA sequence was first linearized by a BbsI digest and gel purified. Two primers sgTuj-1 F and sgTuj-1 R were phosphorylated, annealed, and ligated to the linearized vector pSLQ1654 to generate pSLQ1654-sgTuj1. sgTuj-1 F: caccgcccaagtgaagttgctcgcagc (SEQ ID NO:378). sgTuj-1 R: aaacgctgcgagcaacttcacttgggc (SEQ ID NO:379).

[0138] Construction of DNA template. The Tuj1-IRES-hCD8 vector (pSLQ1760) was assembled with three fragments (5′ homologous arm of Tuj1, IRES-hCD8 and 3′ homologous arm of Tuj1) and a modified pUC19 backbone vector by using Gibson Assembly Master Mix (New England Biolabs). Both 5′ and 3′ homology arms were PCR amplified from the genomic DNA extracted from mouse ES cells with Herculase 11 Fusion DNA polymerase (Agilent). The IRES-hCD8 was PCR amplified from pSLQ1729 (gift from Wendell Lim). The backbone vector was linearized by digestion with PmeI and Zra1. All DNA fragments and the backbone vector were gel purified followed by a Gibson assembly reaction. Primers: 5′ homologous arm F: aaagtgccacctgacactcagtccLagatgtcgtgcgg. 5′ (SEQ ID NO:380) homologous arm R: tcacttgggcccctgggct (SEQ ID NO:381). IRES-human CD8 F: caggggcccaagtgaactagtaaaattcgcccctctccctc (SEQ ID NO:382). IRES-human CD8 R: cagctgcgagcaactttaacctgcaaaaagggagcagtuaaagg (SEQ ID NO:383). 3′ homologous arm F: agttgctcgcagctggggt (SEQ ID NO:384). 3′ homologous arm R: agctggagaccgttttttctgactgactggatacagggcat (SEQ ID NO:385).

[0139] Electroporation and clonal Tuj1-hCD8 CamES cells: 2.5 μg pSLQ1654-sgTuj1, 12.5 μg Tuj1-1RES-hCD8 template DNA in 100 μL. Nucleofector solution (Amaxa) were electroporated into 1×10⁶ CamES cells using program A-030. Both plasmids were maxiprepped using the Endofree Maxiprep Kit (Qiagen). After 3 days of culture, sorted single cells were seeded in a 96-well plate with one cell per well. All clonal cell lines were analyzed using PCR and sequencing (Yu et al., 2015 Cell 16, 142-147).

[0140] Quantitative RT-PCR

[0141] Cells were harvested using Accutase (STEMCELL), and total RNA was isolated using the RNeasy Plus Mini Kit (QIAGEN), according to manufacturer's instructions. Reverse transcription was performed using iScript cDNA Synthesis kit (Bio-Rad). Quantitative PCR reactions were prepared with iTaq Universal SYBR Green Supermix (Bio-Rad). Reactions were run on a LightCycler thermal cycler (Bio-Rad). Primers used are summarized in Table 2.

[0142] High-Throughput Pooled Self-Renewal Screening

[0143] Screens were performed in two independent replicates. For both screens. 10⁸ CamES cells were transduced with the pooled lentiviral library with an MOI of 0.3 on day −3. On day −2, CamES cells were treated with puromycin (Invitrogen, 1 μg/mL) in basal medium supplemented with LIF and 2i. After 48 hours of puromycin selection, cells were harvested as the day 0 sample. Another 10⁸ CamES cells with the same treatment were passaged for 10 times under the basal medium supplemented with LIF and Doxycycline (Invitrogen, 100 ng/mL), without 2i. Cells were passaged every 3 days. After 30 days, cells were harvested, stained with mouse anti-SSEA1 (BD, 1:50), and FACS sorted using BD FACS Aria2 as SSEA1+ sample (FIG. 9A). For the individual sgRNA validation experiments, a similar protocol was used, except that the CamES cells were infected with a high MOL. Top 100 hits are summarized in Table 3.

[0144] High-Throughput Pooled Neural Differentiation Screening

[0145] The neural differentiation screens were performed as two independent replicates. For both screens, 10⁸ CamES cells were seeded at 40,000 cells/cm² density at day −1. Cells were transduced with pooled lentiviral sgRNA library with an MOI of 0.3 at day 0 in basal medium supplemented with LIF and 2i. At day 1, puromycin was added at 1 μg/mL in ES2N medium (Millipore) with Doxycycline for another 24 hours. Fresh ES2N medium was changed with Doxycycline every day starting day 2. On day 12, cells were harvested and sorted for hCD8+ and hCD8− cells using EasySep human CD8 isolation kit (STEMCELL Technologies) (FIG. 20F). For the individual sgRNA validation experiments, a similar protocol except that CamES cells were cultured in basal medium seeded at 5,500 cells/cm² after puromycin selection and transduced with a high MOI was used. Top 100 hits are summarized in Table 4.

[0146] Flow Cytometry Analysis

[0147] Cells were harvested, washed, and adjusted to a concentration of 10⁶ cells/mL, in ice cold PBS with 2% FBS. Cells were stained and incubated with diluted primary antibodies at 4° C. for 30 mins in Eppendorf tubes. After staining, cells were washed three times by centrifugation at 400 g for 5 mins and resuspended in 500 μL to 1 mL in ice cold PBS. Cells were kept in dark on ice and analyzed using BD Accuri C6 Cytometer.

[0148] Immunocytochemistry

[0149] Experiments were performed on cells seeded on plate (IBIDI) that had been coated with gelatin (0.1%) overnight at 37° C. Cells were washed twice with PBS, fixed in 4% Paraformaldehyde (Wako) for 15 mins at room temperature, permeabilized and blocked with 0.1% Triton X-100, 5% donkey serum in PBS (blocking buffer) for 1 h at room temperature. After three times wash with PBS, cells were incubated with primary antibodies. The following primary antibodies with indicated dilution in blocking buffer were used: Rabbit anti-Oct4 (Santa Cruz, 1:200), Rabbit anti-Nanog (Abcam, 1:500), Mouse anti-Tuj1 (Covance, 1:1000), Rabbit anti-Map2 (Cell Signaling Technology, 1:200), Rabbit anti-NeuN (Abcam, 1:1000), Rabbit anti-vGluT1 (Synaptic Systems, 1:200). Rabbit anti-GFAP (Dako, 1:500), Rabbit anti-Olig-2 (Millipore, 1:500) Cells were incubated with primary antibodies at 4° C. for overnight, then washed three times with PBS. After staining with corresponding secondary antibodies in blocking buffer for 1 hour at room temperature, cells were washed three times with PBS and stained with DAPI (Vector Labs) for 5 mins. Washed cells were examined using a Nikon Spinning Disk Confocal microscope with TIRF.

[0150] Electrophysiology

[0151] External bath solution for whole cell patch clamp recordings contains (in mM) 140 NaCl, 5 KCl, 2 cacl₂, 2 MgC₂, 20 HEPES, and glucose 10, pH 7.4. Action potentials were recorded current-clamp while sodium and potassium currents were recorded under voltage clamp. The internal pipette solution contained (in mM): 123 K-gluconate, 10 KCl, 1 MgCl2, HEPES, 1 EGTA, 0.1 CaCl2, 1 MgATP, 0.3 Na4GTP and glucose 4, pH 7.2. For current clamp experiments, currents were injected to keep membrane potentials around −65 mV, and action potentials were elicited by stepwise current injections.

[0152] Western Blot

[0153] Samples were collected with NP40 buffer with protease inhibitor and phosphatase inhibitor, and boiled in 1×SDS loading buffer, separated by SDS-PAGE gels, and transferred onto a nitrocellulose (NC) membrane, which was blocked with 5% non-fat dry milk and incubated with primary antibodies at 4° C. overnight. Rabbit anti-Jun antibody (Cell Signaling Technology, 1:1000), rabbit anti-β-actin antibody (Cell Signaling Technology, 1:5000), rabbit anti-phospho-Jun antibody (Cell Signaling Technology. 1:1000) were used as primary antibodies. HRP-conjugated donkey anti-rabbit IgG (Jackson ImmunoResearch, 1:5000) were used as secondary antibodies. Signals were detected using SuperSignal West Femto Maximum Sensitivity Substrate (Thermo Scientific). β-actin was used as a loading control.

[0154] Differentiation of Mouse ES Cells Through Embryoid Body Formation

[0155] The sgKlf2- and sgMlxip-transduced CamES cells were trypsinized, plated on ultralow attachment plates, and cultured in Knockout DMEM supplemented with 10% FBS, without Doxcycline. After 6 days, aggregated cells were collected and seeded onto gelatin-coated plates. Four days later, cells were fixed and stained with markers for three germ layers.

[0156] RNA-Seq

[0157] CamES cells were transduced with individual sgRNAs, expanded, and differentiated after 2 days of puromycin selection in 6 well plates. Total RNA was purified using RNeasy Plus Mini Kit (Qiagen). Libraries were prepared using TruSeq Stranded mRNA LT Sample Prep kit (Illumina) according to the manufacturer's instructions. Samples were combined and purified using Ampure XP Agencourt beads (Beckman Coulter) and sequenced on a Hi-Seq 4000 (Illumina), to generate paired-end 150 bp reads. Each sample was sequenced to an average depth of 40 million reads.

[0158] Reads were mapped with kallisto (Bray et al., 2016 Nature biotechnology 34, 525-527) to the provided GRCm38 downloaded from bio math at Berkley. Normalized gene expression and differentially expressed genes were estimated using sleuth (Pimentel et al., 2016 bioRxiv) and DESeq2 (Love et al., 2014 Genome Biol 15, 550) for the self-renewal and neural data, respectively. Gene ontology analysis was performed using the Bioconductor package gage (Luo et al., 2009 BMC Bioinformatics 10, 161). AP-1 targets were defined as genes that have an AP-1 consensus binding motif (Biddie et al., 2011 Mol Cell 43, 145-155; Rauscher et al., 1988 Genes & Development 2, 1687-1699; Shaulian and Karin, 2002 Nat Cell Biol 4, E131-E136; Zhou et al., 2005 DNA Research 12, 139-150) within 500 bases upstream of the TSS.

[0159] Bioinformatic Analysis of sgRNA and Gene Hits

[0160] Data processing was conducted with custom scripts. Reads were mapped allowing for a mismatch for the first and last base pair of the spacer, which uniquely identified sgRNA.

[0161] Each sample was normalized by the total read count. This gave a frequency for each sgRNA:

$${f}_{sgRNA} = \frac{sgRNA counts}{\sum sgRNA counts}$$

[0162] For the self-renewal screen, in each condition (CamES cells and SSEA+ cells), frequency for each sgRNA was averaged across replicates. sgRNA with less than 20 counts at time 0 were discarded. The sgRNA enrichment (E_{sg}) was calculated as the log 2 fold change from the average time 0 frequency to the average SSEA+ frequency.

[0163] For the neuronal differentiation screen, the paired Tuj1-hCD8+ and Tuj1-hCD8− were used to compute the enrichment scores. Specifically, frequencies were computed as above, sgRNA with less than 1 count in the Tuj1-hCD8− library was discarded. Enrichment for each sgRNA in each replicate was calculated as the log 2 fold-change from the Tuj1-hCD8− sample to the Tuj1-hCD8− libraries. Enrichment was averaged across replicates and used as E_{sg} in subsequent analysis.

[0164] For each gene, an enrichment score (ES_{gene}) was calculated from the sgRNA enrichment above, as follows. An unnormalized enrichment score (E_{gene.top3}) was calculated by averaging F_{sg} for the 3 sgRNA with highest E_{sg}. E_{gene.top3} was normalized by the distribution of nontargeting sgRNA as follows (Gilbert et al., 2014 Cell 159, 647-661).

[0165] Suppose a gene had N targeting sgRNA. Then, 10000 bootstrap samples of size N were drawn from the nontargeting sgRNA. For each sample of size N, E_{sample.top3} was computed as above. This gave an empirical estimate of the distribution of E_{gene.top3} if the all the sgRNA targeting that gene had been negative control sgRNA. For the final, normalized gene enrichment score (ES_{gene}), the unnormalized enrichment score was divided by the 0.9 quantile of thie smpirical distribution:

$${ES}_{gene} = \frac{{E}_{gene , top 3}}{{quantile}_{samples} ( {E}_{sample , top 3} , 0.9 )}$$

[0166] After ranking genes by ES, the most enriched sgRNA for each gene was selected to subsequently validate.

### Results

[0167] Generation of CRISPRa Mouse Embryonic Stem Cells for Single sgRNA-Mediated Gene Activation and Cell Fate Control

[0168] Single sgRNA-mediated efficient endogenous gene activation is useful for large-scale pooled screens of sophisticated cell differentiation phenotypes (FIG. 1A). To establish such a highly efficient CRISPRa system, a reported CRISPRa system based on a polypeptide array, SunTag, was used (Tanenbaum et al., (2014). Cell 159, 635-646). A panel of individual or mixed sgRNAs was used to activate endogenous Brn2 (FIGS. 8A and 8B), a gene driving neuron formation in mouse ES cells (Sokolik et al., 2015 Cell Systems 1, 117-129). Mixed sgRNAs showed better activation compared to individual sgRNAs, whereas none of them induced neural differentiation.

[0169] The dCas9-SunTag system contains two components, a SunTag polypeptide domain fused to dCas9 and a VP64 transactivator domain fused to a single chain fragment variable (scFv). It was investigated whether their expression ratio was a key factor determining the activation efficiency. To facilitate fine-tuning their ratio, each component was cloned onto a lentiviral vector (FIG. 8A). The dCas9-Suntag fusion was expressed using a Doxycycline (Dox)-inducible promoter pTRE3G, and the SFFV promoter was replaced with an EF1a promoter for Tet-On 3G transactivator expression, as silenced SFFV activity was observed during ES cell differentiation. It was tested if promoters (PGK, EF1a, and SFFV) with different strengths driving scFv-VP64 fusion could lead to various activation efficiencies. It was observed the PGK promoter exhibited best endogenous Brn2 expression using both bulk and clonal cells (FIGS. 8C and 8D). By tuning the stoichiometry ratio between the two components, an enhanced CRISPRa (eCRISPRa) system with better activation of endogenous genes was obtained.

[0170] Twenty eight clonal cell lines with the PGK promoter were sorted, and one cell line (#5) showing best Brn2 activation was obtained, which was named CamES (CRISPR-activating mouse ES) cells (FIG. 8E). It was confirmed that this cell line could be stably cultured in ES cell conditions, while maintaining stem cell morphology and pluripotency and expressing eCRISPRa components over a long-term passage (FIG. 8F). It was determined if CamES cells allowed efficient activation of another gene, Asc11, using a single sgRNA. All 5 Asc11 sgRNAs showed strong activation (>10,000 fold) compared to using a control sgRNA (FIG. 1B). In addition, the activation efficiency varied among 5 sgRNAs, showing that a broad range of gene activation can be achieved.

[0171] It was next tested if this promoted neural differentiation (Chanda et al., 2014 Stem Cell Reports 3, 282-296). Using a single sgAsc11, robust differentiation of CamES cells into a neuronal phenotype was observed at day 8, which stained positively for the neuronal markers Tuj1 (class III beta-tubulin) and Map2 (Microtubule-associated protein 2) (FIG. 1C). All negative controls (CamES cells without sgRNA, CamES cells with non-target control sgRNA, and E14 mouse ES cells with sgAsc11) showed no neural differentiation morphology or neural marker expression, confirming neurons were indeed induced by eCRISPRa-mediated target gene activation. Another neural transcription factor, Neurog1 (Velkey and O'Shea, 2013 Dev Dyn. 242, 230-253), was tested with a single sgRNA, and similarly observed neuron formation (FIG. 1C). The cell line also showed efficient skeletal muscle differentiation using a single sgRNA activating MyoD1 (FIG. 1C) (Shani et al., 1992 Symp. Soc. Exp. Biol. 46, 19-36). These experiments together demonstrate that CamES cells allow single sgRNA-mediated endogenous gene activation and cell differentiation.

[0172] The CamES cells activating endogenous Asc11 were compared with overexpression of exogenous Asc11 cDNA for neural differentiation. A similar neuronal phenotype was observed using the two approaches (FIG. 1C). It was found that cells using two systems showed similar morphogenetic features characterized by the formation of neural rosettes after 6 days of differentiation and extensive neurite outgrowth between days 8-12 (FIG. 9H). Though overexpression of exogenous cDNA showed higher total Asc11 expression, CRISPRa-mediated endogenous Asc11 activation exhibited comparable or even better neural differentiation as seen by the fold change of other neural markers Brn2, Tuj1, and Map2 over a 10-day differentiation process (FIG. 1D). The data demonstrated that modulating endogenous genes is a better strategy for directed cell differentiation compared to cDNA expression. Taken together, these results showed that the CamES cells were able to induce high-level endogenous gene expression using only a single sgRNA for controlling cell fate.

[0173] CamES Cells Allow an eCRISPRa-Mediated Dropout Screen to Identify Transcription Factors that Maintain Self-Renewal

[0174] CamES cells were used as an unbiased screening platform to identify key factors among the set of all putative transcription factors that direct cell fate determination. Initial studies focused on factor contributing to the maintenance of ES cell self-renewal. An sgRNA library targeting all putative TFs (˜800) and a small set of lincRNAs (long intergenic noncoding RNAs) (˜50) was generated. Multiple sgRNA (60 sgRNAs per gene on average) were designed to target each gene to cover a broad range of gene activation. An additional 9,296 non-targeting negative control sgRNAs were included. Altogether, a library with a total of 55,336 sgRNAs was generated (FIG. 2A).

[0175] The sgRNA library was introduced into CamES cells as a gain-of-function screen to study stem cell self-renewal. Self-renewal of mouse ES cells in serum-free conditions requires simultaneous inhibition of the GSK3 and ERK pathways, which is typically achieved by using two small molecule inhibitors (2i) (Ying et al., 2008 Nature 453, 519-523). It was determined whether activating transcription factors could functionally rescue the loss of 2i to support self-renewal over a long period of time. To do this, the lentiviral sgRNA library was transduced into CamES cells, cultured the transduced cells in −2i medium, and passaged every three days (FIGS. 2A and 9A). For library transduction, MOI (multiplicity of Infection) was kept below 0.3 such that the majority of cells were transduced only with a single sgRNA. Over half of cells quickly lost pluripotency markers (SSEA1 and Oct4) and initiated spontaneous differentiation within two passages post library transduction (FIGS. 28 and 2C). Repeated passaging of cells removed most differentiated cells, while the SSEA1+ population gradually increased over time, providing a dropout screen. After 10 passages, SSEA1+ cells were sorted using FACS (flow cytometry activated sorting), which further increased SSEA1+ cell percentage to 96.9% (FIG. 2B). The sorted cells showed mouse ES cell morphology and were Oct4+, confirming maintenance of pluripotency (FIG. 2C).

[0176] To identify genes whose gain-of-function maintains self-renewal of ES cells, deep sequencing was used to read out the sgRNA representation (FIG. 2A). The overall distribution of sgRNAs from samples collected from the original plasmid library, CamES cells with sgRNA library at day 0, and sorted SSEA1+ cells after passage 10 were compared (FIG. 9A). Only a small fraction of sgRNAs were detected after sorting compared to the plasmid library and day 0 samples (FIGS. 2D and 2E), indicating an efficient selection process.

[0177] Gene-level enrichment scores were obtained by considering the enrichment of the top three sgRNAs targeting each gene and normalizing by the empirical distribution of the non-targeting sgRNA. A good correlation was obtained between both sgRNA enrichment and gene-level scores across independent library transductions (FIG. 9B).

[0178] Validation of Top Enriched sgRNAs Promoting Long-Term Maintenance of Self-Renewal in ES Cells

[0179] Using the non-targeting sgRNA normalized gene scoring method, all detected sgRNAs and their targeting genes were ranked (FIG. 10). For each gene, the majority of designed sgRNAs were depleted, implying either most genes had no function in self-renewal or the depleted sgRNAs were unable to sufficiently activate gene expression for functional genes. Major pluripotency factors such as Nanog, Sox2, Klf4, and Oct4 appeared as top enriched hits, consistent with previous works showing their critical roles in maintaining stem cell self-renewal (Chambers et al., 2003 Cell 113, 643-655; Masui et al., 2007 Nat. Cell Biol. 9, 625-635; Mitsui et al., 2003 Cell 113, 631-642; Niwa et al., 2000 Nat. Genet. 24, 372-376; Zhang et al., 2010 J. Biol. Chem. 285, 9180-9189).

[0180] The most enriched sgRNAs of the top 18 genes were selected for validation (FIG. 3A). The 18-gene list contained pluripotency genes (Klf2 and Id1) (Jiang et al., 2008 Nat. Cell Biol. 10, 353-360; Yeo et al., 2014 Cell Stem Cell 14, 864-872; Ying et al., 2003a Cell 115, 281-292), lineage specific genes (Etv2 and Isl2) (Koyano-Nakagawa et al., 2012 Stem Cells 30, 1611-1623; Thaler et al., 2004 Neuron 41, 337-350), and one lincRNA gene (4930555M17Rik). For validation, 18 individual sgRNAs were constructed and transduced into CamES cells. Six individual non-targeting sgRNAs were included as negative controls. None of the negative control sgRNAs was able to maintain stem cell self-renewal in −2i medium condition beyond passage 2.

[0181] Quantitative PCR results confirmed activation of target genes by each sgRNA (FIG. 3B). All 18 sgRNAs maintained stem cell morphology and expressed pluripotency markers Oct4, Nanog, and SSEA1 after culturing in −2i condition over 30 days (FIG. 3C). Notably, 9 out of 18 validated genes (Mlxip, Etv2, Zc3h11a, Zfp36, Isl2, Tfeb, Fig1a, Hsf2, and Hoxc11) are not previously annotated for maintenance of pluripotency and self-renewal. The high rate of validated true hits indicates that the screening method provides an effective dropout screen of genes promoting self-renewal and maintaining pluripotency.

[0182] Deep Sequencing and Functional Validation Confirmed the Function of Positive Hits for Self-Renewal Maintenance

[0183] sgMlxip was chosen to explore its role in promoting self-renewal. The MLXIP protein forms a heterodimer with MLX (Max-like protein X) and modulates transcriptional regulation in response to cellular glucose levels (Stoltzman et al., 2008 Proc. Natl. Acad. Sci. USA 105, 6912-6917), and its function related to ES cell self-renewal is unknown.

[0184] The developmental potential of CamES +sgMlxip cells cultured in −2i conditions for generating the three germ layers was evaluated using CamES +sgKlf2 as a comparison. After removal of Dox to switch of eCRISPRa activity, spontaneous differentiation of both samples in serum-based medium via embryoid body formation generated cells representative of ecdoderm (Tuj1+), mesoderm (SMA+), and endoderm (Sox17+) lineages (FIG. 4A). This confirmed the differentiation potential of these cells cultured in −2i medium.

[0185] RNA-seq analysis was performed on CamES +sgMlxip and CamES +sgKlf2 cells cultured in −2i conditions, and compared to CamES cells cultured with or without 2i. Both samples exhibited high mRNA expression for most pluripotency genes and low expression for most lineage specific genes, with a pattern similar to ES cells cultured in 2i medium and distinct from cells without 2i (FIG. 11A), indicating that the CamES +sgMlxip and CamES +sgKlf2 cells maintained a similar gene expression profile as the undifferentiated stem cells in 2i medium.

[0186] The 2i cocktail contains two small molecules that maintain pluripotency by inhibiting GSK3 (CHIR99021) and MEK1/2 (PD0325901) (Ying et al., 2008 Nature 453, 519-523). Via activation of the Wnt pathway and inhibition of the MAPK pathway, the 2i molecules inhibit differentiation while promoting proliferation of ES cells. The RNA-seq gene expression profiles for the Wnt and MAPK pathways were compared among the samples. For the Wnt pathway genes, CamES-sgMlxip cells correlated well with CamES cells in +2i medium (R²=0.81), while poorly with CamES cells in −2i medium (R²=0.35) (FIG. 4B). A different ratio distribution of corresponding gene expression between +sgMlxip/+2i and +sgMlxip/−2i was found (FIG. 11B) (Zhang et al., 2013 Stem Cells 31, 2667-2679).

[0187] Similar results were observed for the MAPK pathway: there was a good correlation between CamES +sgMlxip and CamES +2i samples (R²=0.91), compared to a poor correlation between CamES-sgMlxip and CamES-2i (R²=0.59). Gene expression related to the MAPK pathway showed a similar pattern at the transcript level in both CamES +sgMlxip and CamES +2i cells. For example, inhibition of Jun, a major transcription factor of the MAPK pathway, was observed in both CamES +sgMlxip and CamES +2i cells, as well as inhibition of other MAPK related genes (EGF, FAS, FGF, PDGF and TGFb) (FIG. 11C). These results together indicate that CamES +sgMlxip cells possess similar Wnt and MAPK pathway activities as CamES +2i cells.

[0188] The PI3K pathway, which is important in the regulation of ES cell pluripotency and proliferation (Yu and Cui, 2016 Development 143, 3050-3060), was also investigated. The CamES +sgMlxip cells also showed a similar expression pattern as CamES +2i cells (FIG. 4D). For example, PI3K-related genes such as Fos, Mapkapk2, Gadd45b, and Gadd45g were downregulated in both CamES +sgMlxip and CamES +2i cells, while Ccnd1, Cdk2, Cdk9, and Sod2 were similarly upregulated (FIG. 4D). The PI3K gene expression further confirms the similarity between CamES +sgMlxip cells and ES cells cultured in 2i medium.

[0189] In summary, both functional tests and gene expression indicate that true positive hits identified using the CRISPRa screening method maintain self-renewal of stem cells.

[0190] Engineered CamES Cells Allow an eCRISPRa-Mediated Non-Dropout Screen to Identify Key Factors Promoting Neural Differentiation

[0191] A eCRISPRa gain-of-function screen was performed to identify TFs that promote the dynamic, complex neural differentiation process. Transcription factor-mediated lineage specification is heterogeneous and stochastic: unlike in the dropout screen, a desired differentiated cell type may only represent a small subset of the total population; and spontaneous differentiation may generate the desired cell type even when a non-functional factor is present.

[0192] To address these challenges, a clonal reporter CamES (Tuj1-hCD8 CamES) cell line carrying a biallelic human CD8 (hCD8) gene cassette appended downstream to endogenous Tuj1 via an IRES (internal ribosome entry site) was established (FIGS. 5A and 12A). Upon transduction with sgAsc11 and Dox induction, differentiated Tuj1-hCD8 CamES cells expressed both Tuj1 and hCD8 (Figure S5B). MACS (magnetic-activated cell sorting) was used to isolate hCD8+ and hCD8− cells, and observed hCD8+ cells expressed a higher level of neural markers (Tuj1 and Map2) compared to hCD8− cells and unsorted cells (FIG. 5B). This demonstrates that sorted hCD8+ cells are positively correlated with differentiated neuron cells.

[0193] The parameters of cell density and differentiation time for screening, which affected neural differentiation efficiency, were determined. 40,000 cells/cm² was chosen as the seeding density, as Tuj1-hCD8 CamES cells transduced the sgRNA library maximized the seeding cell number and showed detectable neural marker expression Tuj1 and Map2 (FIG. 12C). Day 12 was chosen as the sample collection time point, when differentiated cells showed neuronal morphology and expression of neural markers (FIGS. 12D and 12E). With these conditions, MACS was performed to sort and isolate Tuj1-hCD8 positive and negative populations (FIGS. 5A and 12F).

[0194] Deep sequencing was used to identify sgRNAs for transcription factors that enhance neural differentiation. The overall distributions of sgRNA from samples collected from plasmid library, sorted Tuj1-hCD8+ and Tuj1-hCD8− cells was compared (FIGS. 5A and 12F). In contrast to the self-renewal screen, a larger fraction of sgRNAs were detected after sorting compared to the plasmid library (FIGS. 5C and 5D). In addition, Tuj1-hCD8+ and Tuj1-hCD8− cells exhibited similar sgRNA depletion.

[0195] Stem cell differentiation is affected by stochastic factors. In these experiments, activation of Asc11, a powerful neural inducer, led to only 47.6% of cells being Tuj1-hCD8+(FIG. 12B). In addition, the effects of spontaneous differentiation and less proliferative capacity of desired differentiated cells may affect the overall screening outcome. Thus, most sgRNAs in the non-dropout neural differentiation screen cannot be depleted as strongly as in the dropout screen (FIGS. 5C and 5D). It was contemplated that normalizing positive population against the negative population would more accurately identify the TFs that drive neural differentiation. Thus, paired comparative analysis of Tuj1-hCD8+ and Tuj1-hCD8-cell populations was used to rank the most enriched genes and their sgRNAs.

[0196] Validation of Top Enriched sgRNAs Promoting Neural Differentiation

[0197] Among the ranked gene hits, the top 20 most effective sgRNAs were chosen for validation (FIGS. 13 and 6A). The 20-gene list contained known neuron-driving transcription factors (Neurog1, Brn2, and Klf12) (Theodorou et al., 2009 Genes Dev. 23, 575-588), and genes that were not previously linked to neural early development including epigenetic regulators (Ezh2, Suz12) and signaling proteins (Jun).

[0198] Twenty individual sgRNAs for the top gene hits, as well as 6 non-targeting negative control sgRNAs were tested, Quantitative PCR results showed activation (10 to 10,000 fold) of 19 genes out of 20 tested by their cognate sgRNA (FIG. 6B). Using Tuj1-hCDg CamES cells, Tuj1-hCD8 expression was measured after 12 days of differentiation in basal medium by FACS. All 20 sgRNAs transduced-cells showed expression of hCD8 in a significant percentage of cells (10-50%), while all 6 negative control sgRNAs or cells without a transduced sgRNA showed no hCD8+ cells (FIG. 6C).

[0199] Another neuronal marker, NCAM, was used to test differentiation of CamES cells. Similarly, all 20 sgRNAs generated NCAM+ cells (20-60%) after 12 days of differentiation in basal medium, and all negative control sgRNAs showed much less NCAM+ cells (below 10%) (FIG. 6D). Positive immunostaining of neural marker Map2 in all 20 sgRNAs differentiated cells was observed (FIG. 6E). One sgRNA targeting Arnt failed to activate target expression at the time it was assayed for activation. However, this sgRNA was able to induce neural differentiation, which may be due to a longer latency of activation, activation of nearby regulatory elements (e.g., a cis-acting lincRNA), or off-target effects.

[0200] Activation of different endogenous genes induced different neural subtypes (FIG. 6F). Most genes induced a high percentage cells expressing neuron markers (Tuj14+, Map2+, and NeuN+). Some hits such as Nr2f1, Nr3c1, and Tcf15 induced more cells with a positive astrocyte marker GFAP. The oligodendrocyte marker Olig2 and the Glutamatergic neuron marker vGluT1 were assayed, and varying levels of expression across the top 20 sgRNAs was observed.

[0201] Functional Test and Transcriptome Profiling Confirmed sgJun-Induced Neural Differentiation

[0202] The role of Jun for promoting neural differentiation was examined. Jun has not previously been tied to early neural development. It was observed that sgJun could induce functional neurons that were able to generate action potentials upon current injection (FIG. 7A). RNA-seq was performed to profile the transcriptome of CamES +sgJun cells at various time points (day 0, 2, 5, and 12) (FIG. 14A). Cells were analyzed at different time points using PCA (Principal component analysis), and four distinct clusters that correlated with a dynamic process of neural differentiation were identified (FIG. 7B). It was found that the pluripotency genes were consistently downregulated starting at day 2 after sgJun transduction, and neural marker genes were upregulated throughout the process (FIG. 7C). Meanwhile, day 12 cells were highly enriched for Gene Ontology (GO) terms associated with neural fate and functions, such as axonogenesis and neuron projection guidance (FIG. 7D).

[0203] Jun regulates downstream target genes through its phosphorylation and the AP-1 complex formation with c-Fos (Rauscher et al., 1988 Genes Dev. 2, 1687-1699). It was confirmed that endogenous Jun induced by sgJun also was phosphorylated (FIG. 7E). Analysis of AP-1 target genes showed that they were activated at days 5 and 12 (FIG. 7F). It was also found that expression of both FGF ligands and receptors (Fgf5, Fgf8, Egf9, Fgfr1, Fgfr2, and Fgfr3) were rapidly increased at day 2 (FIG. 14B). Meanwhile, key genes of the Wnt pathway (Wnt3a, Wnt6, Wnt10b, and β-catenin) were also upregulated in sgJun-induced cells at days 5 and 12 (FIGS. 7G and 14B).

[0204] Previous work reported that overexpression of β-catenin in mouse ES cells induce neurogenesis (Otero et al., 2004: Development 131, 3545-3557). The excessive expression of Wnt genes in the cells indicates that the Wnt pathway plays an important role in sgJun-induced neurogenesis (FIG. 14C). Furthermore, since MAPK, the downstream pathway of FGF, activates Jun via phosphorylation, sgJun-activated endogenous Jun likely maintains its stable expression and sustained activity via a FGF/MAPK positive feedback loop (FIG. 14C), which is consistent with works showing the important role of FGF/MAPK pathway in neural fate commitment of ES cells (Chen et al., 2010 Journal of Biomedical Science 17, 1-11; Ying et al., 2003b Nat. Biotechnol. 21, 183-186). Together, modulation of these pathways through endogenous Jun activation indicates a functional role of Jun for induced neural differentiation of mouse ES cells.

[0205] Paired-Analysis is Useful in the Non-Dropout Cell Differentiation Screen

[0206] In dropout screens, cells that are negative for the phenotype of interest are almost completely removed from the selected population. Therefore, one can calculate enrichment of the selected population relative to initial pool of sgRNAs to infer functional genes (FIG. 14D). In non-dropout screens, the phenotype of interest may arise stochastically (FIG. 14D). If activation of a gene confers a proliferative advantage, then even if the probability of the phenotype of interest is small (spontaneous differentiation), with more cells it would appear that the gene is enriched in the selected population when compared to the initial population. In fact, a high correlation of enriched genes between the positive and negative Tuj1-hCD8 populations was found (FIG. 14E). The top hits relative to initial sgRNA pool in both populations contain many proliferative genes, but few are related to neural phenotype (FIG. 14F). Those proliferative genes disappear, and several known neural genes are identified when the Tuj1-hCD8+ population was normalized against Tuj1-hCD8− population. The final rankings show little correlation with the enrichment in the positive population (FIGS. 14E and 14F), indicating that these proliferative genes were mostly false positives.

TABLE 1
Primers used to construct individual sgRNAs.

| Primers | sgRNA sequence | SEQ ID NO |
|---|---|---|
| Forward | gtatcccttggagaaccaccttgttgnnnn | 386 |
| primer | nnnnnnnnnnnnnnnngtttaagagctaag | |
| | ctggaaacagca | |
| Reverse | gatcctagtactcgagaaaaaaagcaccga | 387 |
| primer | ctcggtgccac | |
| sgBrn2-1 | gggagagagcttgagagcgc | 388 |
| sgBrn2-2 | gcccaggcgcgtgccgctgcgag | 389 |
| sgBrn2-3 | gcggtatccacgtaaatcaaa | 390 |
| sgBrn2-4 | gctccggtctgggaggttgctag | 391 |
| sgBrn2-5 | gcaccaatcactggctccggtc | 392 |
| sgBrn2-6 | gactgagaagactgggcgcccg | 393 |
| sgBrn2-7 | gaatctgaatcgctgagcta | 394 |
| sgBrn2-8 | gaggccggggacagaagaga | 395 |
| sgBrn2-9 | gagcgcctggaccgaccgcc | 396 |
| sgBrn2-10 | gaaatcgtagtcctgctggctgact | 397 |
| sgBrn2-11 | gtgtgtgtgttcctaggagaa | 398 |
| sgBrn2-12 | gtctagctttggctctcgttct | 399 |
| sgAscl1-1 | ggctgggtgtcccattgaaa | 400 |
| sgAscl1-2 | gaatggagagtttgcaaggag | 401 |
| sgAscl1-3 | gtctggagggaaaagtgtctt | 402 |
| sgAscl1-4 | gagttactgcggagagaagaaa | 403 |
| sgAscl1-5 | gagggaaaggctgctcagaca | 404 |
| Neurog1 | ggctgctgggagttgtgcaa | 405 |
| Myod1 | ggtctccagagtggagtccg | 406 |
| Nanog | ggaagtttcaggtcaagtgg | 407 |
| Mlxip | ggcactccacgtggtgggta | 408 |
| Sox2 | gcctttgcaccctttggatg | 409 |
| Klf2 | gagggtaatagagagaggga | 410 |
| Etv2 | gttcgtggctcacctctggc | 411 |
| Klf4 | gtgcgtatgcgagagagggc | 412 |
| Zc3h11a | gcattatcccttagatgcca | 413 |
| Hsf2 | ggattcgcatggaaagggtt | 414 |
| Hey2 | ggtgtgtctagacaggagac | 415 |
| ZFP36 | ggttgtgtacgaccaactgg | 416 |
| Isl2 | gagaggagaaaggagagggt | 417 |
| Tfeb | gacatgggcaataacagggt | 418 |
| Nobox | gcctgcttgatggaaaggta | 419 |
| Figla | ggcatctgaaaccaggagga | 420 |
| Bcl6 | ggtgggaagagagagagaga | 421 |
| Id1 | ggctcaagaactgaaagggt | 422 |
| Hoxc11 | ggaggagagagagagagggt | 423 |
| M17Rik | gctgataaggtagaaaggta | 424 |
| Foxo1 | ggttcaggatgagtggaggc | 425 |
| Nr2f1 | ggagccaagagaagggctgc | 426 |
| Rb1 | ggctacatacagtctaggtt | 427 |
| Pou3f2 | gaggaaggactgagaagact | 428 |
| Ezh2 | ggttcctttcggcaccttgg | 429 |
| Maz | ggaaggcatctctgggaagc | 430 |
| Nr4a1 | gctaacgtgtagtctcgttg | 431 |
| Arnt | gtttgaaactccaggttaat | 432 |
| Dmrt3 | gaggagttgatagttgttcc | 433 |
| Sin3b | gtgcaagaattcagtccaca | 434 |
| Jun | gagaataaagtgttgtgccg | 435 |
| Suz12 | gaagctctcaaggcgagaaa | 436 |
| Klf12 | gatttgaccatctcttgccg | 437 |
| Nr3c1 | gtcactgctctttaccaaga | 438 |
| Tcf15 | gggatatgctcactttggga | 439 |
| Zeb1 | gaaggaactaagtttcttct | 440 |
| Nr6a1 | gatgacggtcggccgtagtt | 441 |
| Mecom | gattctcaggcagggctcta | 442 |
| Hoxc8 | gctctttcctctaacagccc | 443 |

TABLE 2
Primers used for quantitative PCR.

| | | SEQ |
|---|---|---|
| Gene name | Primer sequence | ID NO |
| RiboL7 F | accgcactgagattcggatg | 444 |
| RiboL7 R | gaaccttacgaacctttgggc | 445 |
| Ascl1 F | aagaagatgagcaaggtggagacg | 446 |
| Ascl1 R | gagatggtgggcgacagga | 447 |
| Brn2 F | tttcctcaaatgccctaagc | 448 |
| Brn2 R | ggaggggtcatccttttctc | 449 |
| Tuj1 F | agtcagcatgagggagatcg | 450 |
| Tuj1 R | agtcccctacatagttgccg | 451 |
| Map2 F | agcactgattgggaagcact | 452 |
| Map2 R | caattcaaggaagttgtaaagtagtgaag | 453 |
| | tttg | |
| Nanog F | aaccaaaggatgaagtgcaagcgg | 454 |
| Nanog R | tccaagttgggttggtccaagtct | 455 |
| Mlxip F | aagctcttcgagtgcatgac | 456 |
| Mlxip R | ttgttgagccggatcttgtc | 457 |
| Sox2 F | acaagagaattgggaggggt | 458 |
| Sox2 F | ttttctagtcggcatcaccg | 459 |
| Klf2 F | ccttcggtcttttcgagga | 460 |
| Klf2 R | cttggcctccagcagctc | 461 |
| Etv2 F | acgtagaaggctgctggaa | 462 |
| Etv2 R | tgtccagtctcgcgacca | 463 |
| Klf4 F | aaaagaacagccacccacac | 464 |
| Klf4 R | cgtcccagtcacagtggtaa | 465 |
| Zc3h11a F | catcggttcggtaaagtttctgt | 466 |
| Zc3h11a R | ccactcagccacagaaatcg | 467 |
| Hsf2 F | tgaagcagagttccaacgtg | 468 |
| Hsf2 R | ttgctcatccaagaccagaa | 469 |
| Hey2 F | tgaagatgctccaggctaca | 470 |
| Hey2 F | tctgtcaagcactctcggaa | 471 |
| Zfp36 F | tctcttcaccaaggccattc | 472 |
| Zfp36 R | tatgttccaaagtcctccga | 473 |
| Isl2 F | agtcgaggtgcagacgtac | 474 |
| Isl2 R | ttgcctagggagcctgact | 475 |
| Tfeb F | caacagtgctcccaacagtc | 476 |
| Tfeb R | ttgatgtagcccagcacgc | 477 |
| Nobox F | acggagaagctctgcaagaa | 478 |
| Nobox R | ttgtcttgatcatcctggatgg | 479 |
| Figla F | actcggctgtgttctggaag | 480 |
| Figla R | tgggtagcatttcccaagag | 481 |
| Bcl6 F | ttggactgtgaagcaaggca | 482 |
| Bcl6 R | actccggaggcgattaagg | 483 |
| Id1 F | ctgaacggcgagatcagtg | 484 |
| Id1 R | tttcctcttgcctcctgaag | 485 |
| Hoxc11 F | aacacgaatcccagctcgt | 486 |
| Hoxc11 R | ggatctggaatttcgaataagggc | 487 |
| M17Rik F | cctgagactaatactgtatgatttggaaa | 488 |
| M17Rik R | cacaggtttagagataaccaaagtgg | 489 |
| Foxo1 F | gagtggatggtgaagagcgt | 490 |
| Foxo1 R | tgctgtgaagggacagattg | 491 |
| Nr2f1 F | ccaacaggaactgtcccatc | 492 |
| Nr2f1 R | attcttcctcgctgaaccg | 493 |
| Neurog1 F | cggcttcagaagacttcacc | 494 |
| Neurog1 R | ggcctagtggtatgggatga | 495 |
| Rb1 F | gcagcatcttgattctggaac | 496 |
| Rb1 R | tgtcaagttggcttccacttt | 497 |
| Pou3f2 F | tttcctcaaatgccctaagc | 498 |
| Pou3f2 R | ggaggggtcatccttttctc | 499 |
| Ezh2 F | acttctgtgagctcattgcg | 500 |
| Ezh2 R | cgactgcattcagggtcttt | 501 |
| Maz F | gtggcaagatgctgagctc | 502 |
| Maz R | cattggacaaacctcaccagtac | 503 |
| Nr4a1 F | gctagaaggactgcggagc | 504 |
| Nr4a1 R | attgagcttgaatacagggca | 505 |
| Arnt F | ggcgactacagctaacccag | 506 |
| Arnt R | gccctctgtacaacagctcc | 507 |
| Dmrt3 F | agcgcagcttgctaaacc | 508 |
| Dmrt3 R | gcttttgacaacatctgggg | 509 |
| Sin3b F | agagttcggacagttcctgc | 510 |
| Sin3b R | tcctcattcttctgcccact | 511 |
| Jun F | gaaaagtagcccccaacctc | 512 |
| Jun R | aatcagacaggggacacagc | 513 |
| Suz12 F | tcgaaattccagaacaagca | 514 |
| Suz12 R | tgtggaagaaaccggtaaatg | 515 |
| Klf12 F | ccataaagaatctcagcgcc | 516 |
| Klf12 R | ccatatcggggtagttgtgg | 517 |
| Nr3c1 F | ggacaacctgacttccttgg | 518 |
| Nr3c1 R | ctggacggaggagaactcac | 519 |
| Tcf15 F | tctgcaccttctgtctcagc | 520 |
| Tcf15 R | aaccagggatccaggttcat | 521 |
| Zeb1 F | acagagaatggaatgtatgcatgtg | 522 |
| Zeb1 R | agattccacactcgtgaggc | 523 |
| Nr6a1 F | gcaacggtttctgtcaggat | 524 |
| Nr6a1 R | ggttcgttgttcagctcgat | 525 |
| Mecom F | acagcatgagatccaaaggc | 526 |
| Mecom R | ttatcccatctgcatcagca | 527 |
| Hoxc8 F | aaatcctccgccaacactaa | 528 |
| Hoxc8 R | tgtaagtttgtcgaccgctg | 529 |

TABLE 3
Top 100 gene hits from CRISPRa self-renewal screen.

| Rank | Gene name | Enrichment score |
|---|---|---|
| 1 | Nanog | 6.436538099 |
| 2 | Sox2 | 5.110480488 |
| 3 | Klf4 | 4.679609611 |
| 4 | Bc16 | 4.250485879 |
| 5 | Tfeb | 4.160094948 |
| 6 | Mlxip | 3.992616854 |
| 7 | Klf2 | 3.911099626 |
| 8 | Etv2 | 3.644806172 |
| 9 | Isl2 | 3.468873873 |
| 10 | Hey2 | 3.189713541 |
| 11 | Zfp36 | 2.929649816 |
| 12 | Zc3h11a | 2.83067826 |
| 13 | Sox18 | 2.813521887 |
| 14 | Nobox | 2.627399442 |
| 15 | Figla | 2.607875769 |
| 16 | 4921504A21Rik | 2.594074135 |
| 17 | Hsf2 | 2.552027639 |
| 18 | Hoxc11 | 2.518020583 |
| 19 | Tfcp211 | 2.460616651 |
| 20 | Spi1 | 2.383834061 |
| 21 | Id1 | 2.277631872 |
| 22 | Tlx2 | 2.237444329 |
| 23 | 4930555M17Rik | 1.890123174 |
| 24 | Nov | 1.874188087 |
| 25 | Klf5 | 1.852149928 |
| 26 | Crygf | 1.829064836 |
| 27 | Sox11 | 1.807058979 |
| 28 | Atf5 | 1.774675631 |
| 29 | Esrrg | 1.746829472 |
| 30 | Tsn | 1.744364085 |
| 31 | Thrb | 1.602037631 |
| 32 | Nfe212 | 1.593264465 |
| 33 | Lhx1 | 1.548863185 |
| 34 | Pou5fl | 1.518892786 |
| 35 | Ebfl | 1.452433199 |
| 36 | Dlx5 | 1.403820123 |
| 37 | Mycl | 1.371065103 |
| 38 | Atfl | 1.36137151 |
| 39 | Tftdp1 | 1.326446848 |
| 40 | Irx6 | 1.194061551 |
| 41 | Zfp2 | 1.191847857 |
| 42 | Nfatc1 | 1.188011066 |
| 43 | Crem | 1.049272101 |
| 44 | Nr3c1 | 1.042323412 |
| 45 | Pax5 | 1.024334324 |
| 46 | Foxfl | 1.00419091 |
| 47 | Snai1 | 0.960150521 |
| 48 | Zfp423 | 0.947760908 |
| 49 | Esrrb | 0.904004441 |
| 50 | Pbx2 | 0.899430618 |
| 51 | Foxd4 | 0.895608808 |
| 52 | Sox1 | 0.878521398 |
| 53 | Lbx1 | 0.841046411 |
| 54 | Mecom | 0.820757135 |
| 55 | Ncor2 | 0.780231219 |
| 56 | Nr0b2 | 0.752404477 |
| 57 | Trp53 | 0.743632306 |
| 58 | Lmo3 | 0.732198452 |
| 59 | En1 | 0.731989985 |
| 60 | Rfx1 | 0.725576385 |
| 61 | Maz | 0.700348134 |
| 62 | Alx4 | 0.686172162 |
| 63 | Nr1d2 | 0.679722158 |
| 64 | Tcf15 | 0.620553011 |
| 65 | Egr3 | 0.617223131 |
| 66 | Nr5a1 | 0.614144289 |
| 67 | Tfe3 | 0.60710143 |
| 68 | Spdef | 0.593267507 |
| 69 | Tcfl2 | 0.564881228 |
| 70 | Dlx2 | 0.541542994 |
| 71 | Vezfl | 0.534712227 |
| 72 | Gata1 | 0.504194994 |
| 73 | Arf6 | 0.491842327 |
| 74 | Sox21 | 0.477561748 |
| 75 | Lmx1a | 0.447377739 |
| 76 | Pou4f2 | 0.410773196 |
| 77 | Nr1b2 | 0.406668822 |
| 78 | Fox11 | 0.394295617 |
| 79 | Stat5b | 0.369982068 |
| 80 | Evx2 | 0.360115239 |
| 81 | Sox5 | 0.348850095 |
| 82 | Hivep3 | 0.324844194 |
| 83 | Tfap2a | 0.303852954 |
| 84 | Glis3 | 0.277004435 |
| 85 | Mafk | 0.265635614 |
| 86 | Hoxb5 | 0.256534563 |
| 87 | Myf5 | 0.252944449 |
| 88 | Nkx2-5 | 0.251102596 |
| 89 | Lhx6 | 0.244502182 |
| 90 | Foxs1 | 0.242003106 |
| 91 | Rnps1 | 0.2417908 |
| 92 | Mitf | 0.229103445 |
| 93 | Drd1a | 0.21477535 |
| 94 | Lmx1b | 0.191984237 |
| 95 | Vax2 | 0.183188363 |
| 96 | Hoxa11 | 0.1661187439 |
| 97 | Otp | 0.163494265 |
| 98 | Mxd4 | 0.160929842 |
| 99 | Plag11 | 0.137545433 |
| 100 | Smad5 | 0.128584689 |

TABLE 4
Top 100 gene hits from CRISPRa neural differentiation screen.

| Rank | Gene name | Enrichment score |
|---|---|---|
| 1 | Foxo1 | 2.49122811 |
| 2 | Nr2fl | 2.448600182 |
| 3 | Neurog1 | 2.43849068 |
| 4 | Rb1 | 2.435300527 |
| 5 | Pou3f2 | 2.385360453 |
| 6 | Ezh2 | 2.380072461 |
| 7 | Maz | 2.361103604 |
| 8 | Nr4a1 | 2.351837703 |
| 9 | Arnt | 2.317336958 |
| 10 | Dmrt3 | 2.304207908 |
| 11 | Sin3b | 2.280599668 |
| 12 | Jun | 2.277732884 |
| 13 | Suz12 | 2.276236754 |
| 14 | KIfl2 | 2.269476929 |
| 15 | Nr3cl | 2.249983644 |
| 16 | Tcfl5 | 2.229200027 |
| 17 | Zeb1 | 2.221200461 |
| 18 | Nr6a1 | 2.208496165 |
| 19 | Mecom | 2.207944981 |
| 20 | Trim24 | 2.206262504 |
| 21 | Hoxc8 | 2.184103377 |
| 22 | Foxk1 | 2.171388615 |
| 23 | 2410080102RiK | 2.171161939 |
| 24 | Nr4a3 | 2.168779599 |
| 25 | Trp73 | 2.16579857 |
| 26 | Foxs1 | 2.162897697 |
| 27 | Ikzf3 | 2.15938851 |
| 28 | Nkx2-6 | 2.15063949 |
| 29 | Sox11 | 2.140964961 |
| 30 | 1110054M08Rik | 2.139005342 |
| 31 | Crem | 2.133968618 |
| 32 | Meis3 | 2.131453549 |
| 33 | Bmyc | 2.130409666 |
| 34 | Epas1 | 2.129339686 |
| 35 | Nr2f6 | 2.128397081 |
| 36 | Nacc1 | 2.120269011 |
| 37 | Bsx | 2.120136772 |
| 38 | Foxd3 | 2.114601186 |
| 39 | Myog | 2.107435864 |
| 40 | Smad3 | 2.105254748 |
| 41 | Wt1 | 2.091731056 |
| 42 | Taz | 2.091306567 |
| 43 | Smad7 | 2.071136269 |
| 44 | Stra13 | 2.06971649 |
| 45 | Hoxc4 | 2.062634453 |
| 46 | Pou3f3 | 2.058607569 |
| 47 | Zbtb12 | 2.051837502 |
| 48 | Atf5 | 2.042025795 |
| 49 | Gtf2a2 | 2.041587014 |
| 50 | Pura | 2.040735147 |
| 51 | Snai1 | 2.040229657 |
| 52 | Ncor1 | 2.038396405 |
| 53 | Pcbp2 | 2.036271048 |
| 54 | E2f2 | 2.028758908 |
| 55 | Nfkbib | 2.023153101 |
| 56 | Gli2 | 2.021010016 |
| 57 | Nr0b1 | 2.020715359 |
| 58 | B230110C06Rik | 2.016733057 |
| 59 | T | 2.014396786 |
| 60 | Runx3 | 2.011724145 |
| 61 | Rxra | 2.011600497 |
| 62 | Mafk | 2.009964981 |
| 63 | Foxnl | 2.006315586 |
| 64 | Smad4 | 1.999197443 |
| 65 | Meis2 | 1.998728368 |
| 66 | Hoxa1 | 1.996287157 |
| 67 | Zic1 | 1.992579239 |
| 68 | Sebox | 1.99248237 |
| 69 | Nfyc | 1.983084664 |
| 70 | Lmx1b | 1.980716237 |
| 71 | Lhx3 | 1.979175342 |
| 72 | Hmx2 | 1.978886945 |
| 73 | Arf6 | 1.977331424 |
| 74 | Nfatc3 | 1.975872129 |
| 75 | Neurod6 | 1.973516686 |
| 76 | Smarca4 | 1.972359038 |
| 77 | Twist1 | 1.971479015 |
| 78 | Gzfl | 1.963483117 |
| 79 | Hoxcl0 | 1.962998475 |
| 80 | Tbx4 | 1.962626034 |
| 81 | Npas2 | 1.962608209 |
| 82 | Ctbp1 | 1.960624385 |
| 83 | Gcm2 | 1.960206991 |
| 84 | Is12 | 1.957324105 |
| 85 | Arid5a | 1.956887379 |
| 86 | Lef1 | 1.955552772 |
| 87 | RP24-399L6.2 | 1.953337042 |
| 88 | Smad5 | 1.949029539 |
| 89 | Lbx1 | 1.948838891 |
| 90 | Pax3 | 1.945680745 |
| 91 | Foxj1 | 1.944149198 |
| 92 | Tbx5 | 1.943975816 |
| 93 | Barh11 | 1.943598679 |
| 94 | Hoxd11 | 1.9410811 |
| 95 | Pou1fl | 1.939557398 |
| 96 | Klf3 | 1.938997548 |
| 97 | Pcbp1 | 1.937292841 |
| 98 | Evx2 | 1.935442174 |
| 99 | Irx5 | 1.934100096 |
| 100 | Nkx6-3 | 1.928635054 |

### Example 2

[0207] Quantitative Genetic Interaction Mapping Using CRISPRI

### A. Methods

[0208] The vectors used in this study were constructed by using standard molecular cloning techniques, including PCR, restriction enzyme digestion and ligation. Custom oligonucleotides were from Integrated DNA Technologies. E. coli strain D1H5a was used for the transformation and selected by 100 μg/ml of carbenicillin, or 50 μg/ml of Kanamycin. DNA was extracted and purified using Plasmid Mini or Midi Kits (Macherey-Nagel). Sequences of the vector constructs were verified with Quintarabio's DNA sequencing service.

[0209] Construct Design

[0210] The dCas9-KRAB plasmid and sgRNA expressing plasmid are previously described vectors (Du, D. & Qi, L S. Cold Spring Harbor Protocols 2016, (2016)). The SpeI and Sail sites were mutated in the sgRNA expression plasmid. The single sgRNA expression plasmids were cloned as described previously with minor modifications. Briefly, the plasmids were cloned by PCR from an existing sgRNA template using a unique 50 primer containing the desired protospacer (N is the protospacer) and a common primer with (SpeI and SalI sites). The PCR products and the lentiviral mice 16 (mU6) based sgRNA expression vector were digested with BstXI and XhoI and the two pieces of DNA were ligated together. The single vector was introduced unique SpeI and SalI sites to enable the insertion of the mU6-sgRNA expression cassettes.

[0211] To construct a lentiviral vector for mU6-driven expression of combinatorial gRNAs, mU6-sgRNA expression cassettes were prepared from digestion of the storage vector with XbaI and XhoI enzymes, and inserted into the target single sgRNA expression vector backbone, using ligation via the compatible sticky ends generated by digestion of the target single sgRNA expression vector with SpeI and SalI enzymes.

[0212] The Single Library Cloning

[0213] A library of 336 sgRNAs targeting a set of 112 genes encoding epigenetic regulators (3 sgRNAs/gene) was constructed using top prediction hits from the CRISPR-ERA algorithm (Liu, H, et al Bioinformatics 31, 3676-3678 (2015)). The library also included 30 non-targeting negative control sgRNAs. sgRNAs containing XbaI, XhoI, SpeI, and SalI restriction sites, which were used for double sgRNA library construction, were excluded. Individual oligos encoding sgRNAs were synthesized in a 384-well format, pooled, and the single sgRNA expression vectors were constructed individually by ligating the oligos into a common sgRNA lentiviral vector with SpeI and SalI sites. After sequencing validation, 336 sgRNA constructs were manually mixed with equal amount for the single sgRNA screens and double sgRNA library construction. The sgRNA sequence and corresponding genes are listed in Table 5.

[0214] Combinatorial sgRNA Library Pool

[0215] To generate the pooled storage vector library, the 336 single sgRNA expression vectors were mixed equally. Pooled lentiviral vector libraries harboring combinatorial gRNA(s) were constructed with the same strategy as for the generation of combinatorial sgRNA constructs described above, except that the assembly was performed with pooled inserts and vectors, instead of individual ones. Briefly, the pooled mU6-sgRNA inserts were generated by a single-pot digestion of the pooled storage vector library with XbaI and XhoI. The destination lentiviral vectors were digested with SpeI and SalI. The digested inserts and vectors were ligated via their compatible ends (i.e., XbaI+SalI & XhoI+SpeI) to create the pooled double sgRNA library (336×336=112,896 total combinations) in the lentiviral vector. The lentiviral sgRNA library pools were prepared in DHS ultra-competent cells (Agilent Technologies) and purified by Plasmid Midi Kit (Macherey-Nagel). The sequences of the deep sequencing is listed in Table 6.

[0216] Cell Culture

[0217] 1HEK293T and HEK293 cells were cultured in DMEM supplemented with 10%/6 fetal bovine serum, 100 units/ml streptomycin and 100 mg/ml penicillin at 3TC, with 5% CO₂. To generate inducible CRISPRi HEK293 (TetOn-dCas9-KRAB) cell line, the cells were lentivirally transduced with constructs that express dCas9-KRAB from the TRE3G promoter and rtTA. Pure polyclonal populations of CRISPRi cell line were treated with doxycycline, and sorted by flow cytometry using a BD FACS Aria2 for mCherry expression. These cells were then grown in the absence of doxycycline until mCherry fluorescence reduced to uninduced levels.

[0218] Lentivirus Production and Transduction

[0219] Lentiviruses were produced and packaged in HEK293T cells as described previously with minor modification (Du et al., 2016, supra). Briefly, HEK 293′T were transfected with standard packaging vectors using Mirus TransIT-LT1 transfection reagent (Mirus MIR 2300) according to the manufacturer's instructions. Viral supernatant was harvested 48-72 h following transfection and either filtered through a 0.45 μm syringe filter or snap-frozen.

[0220] Growth Competition Assay

[0221] Cells were grown at minimum library coverage of 1,000 for the screens. The target cells were infected in the presence of 8 μg/ml polybrene (Sigma) at a multiplicity of infection of about 0.3 to ensure single copy integration in most cells, which is corresponded to an infection efficiency of 30-40%. For single library screens, cells were grown in the flasks and harvested at 0, 12 and 20 days after puromycin selection; for double library screens, cells were grown in the flasks and harvested at 0, 8 and 16 days after puromycin selection. Cells were maintained at least 1,000 cells per sgRNA for each screen.

[0222] After the cell samples were collected, the genomic DNA was isolated using QIAamp DNA Blood Maxi Kit (Qiagen) according to the manufacturer's protocol, the cassette encoding the sgRNA was amplified by PCR, and relative sgRNA abundance was determined by next generation sequencing on an Illumina Miseq for single screens or an lllumina HiSeq-2500 for double screens using custom primers with previously described protocols at high coverage (Bassik, M. C. et al. Cell 152, 909-922(2013); Roguev, A. et al. Nat. Methods 10, 432-437 (2013)). Two biological replicates of each screen were performed.

[0223] For the cell growth validation experiments, the viruses with single sgRNAs or double sgRNA were transduced into HEK293 (TetOn-dCas9-KRAB) cells, followed by the selection with 2 μg/ml puromycin to remove the uninfected cells. Three days after the cells were treated with or without Dox (0.5 ug/ml), the cell viability was measured by XTT assay (Biotium) according to the manufacturer's experimental protocol. 2,000 to 10,000 cells were plated into 96-well tissue culture plates for the growth assay. For each 96 well, 30 μl of XTT solution was added to the 100 ul cell cultures at the time points indicated. Cells were incubated for 6 hours at 37 C with 5% CO₂. Measure the absorbance signal of the samples with a spectrophotometer at a wavelength of 450-500 nm. Measure background absorbance at a wavelength between 630-690 nm. The normalized absorbance values were obtained by subtracting background absorbance from signal absorbance.

[0224] Validation of Gene Hits

[0225] Cells were harvested and total RNA was isolated using the RNAeasy Kit (Qiagen), according to manufacturer's instructions. RNA was converted to cDNA using iScript™ cDNA Synthesis Kit according to manufacturer's instructions (Bio-rad). Quantitative PCR reactions were prepared with a 2× master mix according to the manufacturer's instructions (Bio-rad). Reactions were run on CFX96 Touch™ Real-Time PCR Detection System (Bio-rad). Primer sequences for qPCR are listed in Table 3.

### Results

[0226] To develop a CRISPRi combinatorial screening approach, a single library consisting of 336 sgRNAs using was constructed using a computational algorithm (Liu, H. et al. Bioinformatics 31, 3676-3678 (2015)), which sequence-specifically targeted 112 genes (3 sgRNA/gene) involved in chromatin regulation (for the gene list and their sgRNAs, see Table 5). The library also included 30 negative control sgRNAs without target sites in the human genome. Pooled cloning of 336 sgRNAs onto itself generated a mixed double sgRNA library containing 112,896 (336×336) combinations. Both libraries were prepared as lentivirus pools ready for large-scale mammalian cell transduction at a low multiplicity of infection (MOI=0.3).

[0227] The repressive dCas9-KRAB protein was conditionally expressed under the control of the Doxycycline (Dox)-inducible promoter TetON-3G in the human embryonic kidney 293 (HEK293) cells. Transducing both libraries into clonal HEK293-dCas9-KRAB cells generated two pooled cell populations (FIG. 16A): one with 336 single perturbations and the other with 112,896 double perturbations. Adding Dox to cells could induce expression of dCas9-KRAB to repress target gene(s) guided by co-expressed sgRNA(s) and monitored the growth phenotype from single or double gene perturbations. Pair-ended deep sequencing of sgRNA library distribution for each library (Mi-seq for single library and Hi-seq for double library) was performed with and without Dox, as well as at different time points.

[0228] It was first investigated if sgRNA distribution remained consistent between biological replicates before and after library screening. Sequencing single and double libraries with or without Dox at different time points exhibited consistently high coefficient of determination (R²) (FIG. 15B-E). For example, R² was 0.980 without Dox induction and 0.971 with Dox for the single library (day 20) (FIG. 15B-C); and for the double library (day 16), 0.934 without Dox and 0.906 with Dox (FIG. 15D-E). sgRNA distribution from biological replicates was assayed at other time points and similarly high correlation was observed. Together these data demonstrate that the experimental platform produces data of very high reproducibility.

[0229] It was next determined if inducible expression of dCas9-KRAB allowed one to identify single and double gene perturbations that influenced cell growth (FIGS. 15F & G). It was observed that repression of a set of individual genes dramatically slowed down cell growth in the presence of Dox compared to without (FIG. 15F). This list of genes included gene components of the mediator complex (MED14 and MED15), components of the histone H3-Lys4 methyltransferase complex (WDR82 and WDR5), and RNA polymerase II associated factors (PAF1 and RTF1). Double library culture showed a large number of combinatorial perturbations significantly reduced cell growth with Dox, with an overall bifurcation pattern, wherein the negative controls fell along the diagonal line and the positive controls were biased from the diagonal line (FIG. 15G).

[0230] The above inducible experiments were performed at end time points. sgRNA distribution was further compared for both single and double libraries with and without Dox induction at intermediate time points (day 12 for single library and day 8 for double library). Consistent phenotypes at these time points compared to end time points were observed. For example, a similar list of genes whose repression slowed down cell growth, including ME14, MED15, WDR82, PAF1, and RIF1. The absence of WDR5 at day 12 indicates that WDR5 has a moderate role for growth compared to other gene hits. For the double library, a similar bifurcation pattern was observed, with a difference that the bifurcation degree (measured by the angle between the two populations) is smaller at earlier time points.

[0231] The consistent gene hits and dropout pattern for both libraries between different time points propelled a comparison of datasets across a broad time course. It was investigated if the trend of dropout effects could provide another layer of identification of true positive hits (FIG. 16). For the single library in the presence of Dox, sgRNA enrichment was compared at days 0, 3, 7, and 13 (FIG. 16A). While some genes showed consistent depletion (e.g., RTF1, MED14, SAP30), many other genes showed inconsistent enrichment (e.g., MRGBP). Among 112 epigenetic factors, 20 genes were observed to exhibit consistent depletion over time, showing inhibition of these genes constantly slowed down cell growth (FIG. 168). The double library similarly showed temporal dropout of pairwise sgRNAs assayed at days 0, 8 and 16 (FIG. 16C). Over time, a large number of combinations were consistently depleted as a selection of these was plotted as in FIG. 16D.

[0232] The time-course sgRNA enrichment was compared in the absence of Dox for both single and double libraries. No significant changes of sgRNA distribution were observed over time for both libraries without Dox. For the single library, comparing the day 0 sample with day 12 or day 20 samples (+/− Dox) showed only dropout of gene hits with Dox (FIGS. 17A-B), and for the double library comparing day 0 with day 8 or day 16 (+/− Dox) confirmed similar conclusions. Altogether, these experiments confirmed that the system enables inducible, temporal screens of genetic interactions.

[0233] Two negative interactions were validated, demonstrating their ability to suppress cell proliferation and causing repression of target endogenous genes. Two pairs were chosen for testing: MGBRP/MED6, and BRD7/LEO1. MRGBP is a component of the NuA4 histone acetyltransferase complex involved in gene activation by acetylation of histones; BRD7 is a member of the bromodomain-containing protein family; and LEO1 is a component of the PAF1 complex (PAF1C) involved in transcription of RNA Pol II. The results confirmed the validity of the double repression and synthetic lethality-based growth effects. As shown in FIGS. 16E & 16F, repression of two genes simultaneously (MGBRP & MED6 for FIG. 16E; and BRD7 & LEO1 for FIG. 16F) suppressed cell growth over time, while repression of individual genes did not cause significant growth inhibition. Quantitative PCR results further confirmed the repressive effects of the sgRNAs on the corresponding genes either individually or combinatorically delivered into cells. Notable, the moderate repression effects of the tested sgRNAs supported the strong growth effects of the genetic interacting pairs. Future optimization of CRISPRi repression efficacy allow one to perform screens at different strengths (weak, medium, strong) of gene repression.

[0234] Based on the curated set of protein complexes and pathways, a GI map depicting the genetic cross-talk between different functional modules involved in chromatin was created (FIG. 17). Using a scoring system similar to the S-score (Collins, et al., J. Meth. Enzymol. 470, 205-231 (2010)), 68 negative and 47 positive genetic interactions were identified. Contained within this map are modules corresponding to the INO80 chromatin remodeling complex; the mediator complex (MED); the NuA4 histone acetyltransferase (HAT) complexes; the Nucleosome Remodeling Deacetylase NURD complex; the histone methyltransferase (HMT) complex SET1A/B; the Polycomb complex PRC1; the histone 3 lysine-4 methyltransferases MLL3/4; the SIN3 transcription repressor; Host Cell Factor C (HCFC)-glycosyltransferase (OGT) complex; and nuclear THO transcription elongation complex. Notably, the mediator complex occupies a large set of interactions on the map, interacting strongly, both positively and negatively, with many other functional modules. For example, strong positive GIs were observed between the MED complex and modules corresponding to PRC1 and the SET1A/B complex. Furthermore, strong negative interactions were observed between components of the SIN3 complex and many other modules of mediator components and SWI/SNF family of protein SMARCC2.

[0235] The nuclease Cas9 for gene editing-mediated knockout allows complete loss of function, yet knockout can be heterogeneous among alleles due to existence of in-frame indels. On the contrary, CRISPRi-based dCas9 transcription knockdown leads to partial, homogeneous loss of function (Mandegar, M. A. et al. Cell Stem Cell 18, 541-553 (2016)). Applying the two methods to higher-order genetic screening needs to consider these important differences. For example, as epistatic genetic screens require simultaneous perturbation of multiple genes (usually 2 genes, 4 alleles), the heterogeneity of gene knockout in pooled CRISPR screens may result in a significant portion of cells without proper epistatic perturbation. Among the cells that are properly perturbed, complete knockout of function offers a highly sensitive way to discover novel gene combinations whose perturbation leads to measurable phenotypes (e.g., growth). Yet, combinatorial multiple gene knockouts may easily cause lethal effects by itself, precluding testing other phenotypes (e.g., differentiation or host-pathogen interaction).

[0236] On the contrary, partial knockdown by CRISPRi, while being less sensitive than CRISPR knockout, likely avoids major dominating lethal effects. The homogeneous transcriptional repression could generate cell populations with consistent multi-gene perturbation. Furthermore, sgRNAs binding at various loci along the promoter lead to varying levels of CRISPRi repression, which is contemplated to provide dosage-dependent combinatorial screening distinct from binary perturbation from CRISPR. The demonstration of the inducible and titratable features of CRISPRi combinatorial screening showed the method allows assaying genetic interactions temporally and potentially in a dose-dependent manner.

[0237] Compared to RNAi-based methods, the major approach for genetic interaction mapping, CRISPRi presents a few advantages as well. CRISPRi knockdown is specific (Gilbert, L. A. et al., Cell 159, 647-661 (2014)), with less concerns about multiple sgRNAs in the same cells causing unexpected off-target perturbation. As CRISPR activation (CRISPRa) is based on somewhat similar setup as CRISPRi, by changing a repressive effector into an activating effector, the same approach can be expanded into gain-of-function screening of pairwise of genes. Furthermore, combining CRISPRi and CRISPRa into the some cells is contemplated to allow simultaneous activating a gene while repressing another gene. These dramatically expand the modes of epistatic screens that can be performed.

[0238] Development of high-throughput epistasis-mapping technologies has made it possible to interrogate complex biological phenomena. Mapping the PPI networks and GI networks have become major methodologies to study epistasis. The PPI networks report on gene products that interact physically; (GIs, in contrast, illustrate functional relationships between genes including, but not limited to, physical interactions of their gene products. They often reveal how groups of proteins and complexes work together to carry out biological functions and can describe the cross-talk between pathways and processes. Therefore, the method for mapping GI networks in mammalian cells provides a useful, natural complement to PPI mapping methods and other existing GI mapping methods. Integrating the two types of information is extremely powerful in understanding complex biology in broader contexts of basic and translational research.

TABLE 5
Gene list and sgRNA sequences

| Gene name | sgRNA sequence | SEQ ID NO |
|---|---|---|
| ACTL6A_1 | GTGGGTGGCGGTGGAAGTTA | 1 |
| ACTL6A_2 | GGCCGCGACTGCGAGTCTCG | 2 |
| ACTL6A_3 | GCGCCGGCAGCAGCCATGAG | 3 |
| ACTR8_1 | GCGCTGCAGCCACGACTGCC | 4 |
| ACTR8_2 | GTCTCCGGCCATAATGACCC | 5 |
| ACTR8_3 | GCGGCCCATCGTGCCCGCGC | 6 |
| ARID1A_1 | GGCTCTGTAGGCTCGGGACC | 7 |
| ARID1A_2 | GGAGAAGACGAAGACAGGGC | 8 |
| ARID1A_3 | GCCCCCCTCATTCCCAGGCA | 9 |
| ARID1B_1 | GCATCCTCTTCCTCCTCGTC | 10 |
| ARID1B_2 | GGGGAGCAGCCCCGTCTCCA | 11 |
| ARID1B_3 | GAGGCGGCTCTCAAGGAGGG | 12 |
| ARID2_1 | GGAACTGCCGCAGCTCGTCC | 13 |
| ARID2_2 | GAACCGGGGGGGCAGCGCCG | 14 |
| ARID2_3 | GGGGTCCCGGCTGACAAGTG | 15 |
| ASH2L_1 | GGAGCGGTCGCAAATGCAAC | 16 |
| ASH2L_2 | GCAGCCGCTCCTCCTGGAGA | 17 |
| ASH2L_3 | GTGGCCGTGATGGCGGCGGC | 18 |
| BRD7_1 | GTCGGACAAACACCTCTACG | 19 |
| BRD7_2 | GGGCTTCCGCTCTTTCCCAG | 20 |
| BRD7_3 | GCAGGCCCAGGCCGGCGAAG | 21 |
| BRD9_1 | GCTGGCACCCGGTCGGACCT | 22 |
| BRD9_2 | GAGTGGCGCTCGTCCTACGA | 23 |
| BRD9_3 | GCGAGCGCGGGCGGCCAGCC | 24 |
| CBX2_1 | GTACTCCAGCTTGCCCTGCG | 25 |
| CBX2_2 | GCTGAGCAGCGTGGGCGAGC | 26 |
| CBX6_1 | GTGGGTGCCGCTGAGCAAGA | 27 |
| CBX6_2 | GCTGTCTGCAGTGGGCGAGC | 28 |
| CBX6_3 | GCATCGAGTACCTGGTGAAA | 29 |
| CBX7_1 | GCTGTCAGCCATCGGCGAGC | 30 |
| CBX7_2 | GTGCGGAAGGTGAGGCTGCC | 31 |
| CBX7_3 | GCACCGCTCCCTCCACGCTG | 32 |
| CBX8_1 | GCTCCTGGAAGCGGCCAAGG | 33 |
| CBX8_2 | GGTGGGGGAGCGGGTGTTCG | 34 |
| CBX8_3 | GCACGGAGGCCCTAGGCCCG | 35 |
| CHD3_1 | GCTCCCACTCGGGCTTGGGG | 36 |
| CHD3_2 | GTCTGCCGCCTTCATCACAC | 37 |
| CHD3_3 | GAGGAAAAGAAATCCTCAGC | 38 |
| CHD3_4 | GTTTTAGGCTACTTGGGAGG | 39 |
| CHD4_1 | GCTCCGGCTCCTCCTCGCCG | 40 |
| CHD4_2 | GCGCGACCTGCGGCGGCTCC | 41 |
| CHD4_3 | GGCCGTGAGGGGCGTCTCTT | 42 |
| CNOT1_1 | GTCGAGGAGAGCCGGAGTCG | 43 |
| CNOT1_2 | GGAGCCGCCTGAGGTGAGGC | 44 |
| CNOT1_3 | GTTTCTCTACAAAATGGCGC | 45 |
| CNOT2_1 | GAGCCTAGGGGAGTGGAGTC | 46 |
| CNOT2_2 | GCCGCCTTCTCTTCTCCCCC | 47 |
| CNOT2_3 | GCAGCTCCAGATCCTAGGCC | 48 |
| CNOT3_1 | GTCAGCTTCCGCGGAGCCAT | 49 |
| CNOT3_2 | GTTGTTCTGACGACGGGGGT | 50 |
| CNOT3_3 | GCCGCTATCGCGATAGCGCC | 51 |
| CTR9_1 | GTGAGTGACGGCTCCGGCTC | 52 |
| CTR9_2 | GGAGACTACCGGCTGCGGAG | 53 |
| CTR9_3 | GATGGAGCCCCGCGACATGA | 54 |
| CXXC1_1 | GAATGAATACAACTTGATCC | 55 |
| CXXC1_2 | GAACCTCTCTGCCTGACAAA | 56 |
| CXXC1_3 | GGACGGCTGTGTGCCTTGCG | 57 |
| DMAP1_2 | GGCCGTTAGGAACATCCAAG | 58 |
| DMAP1_2 | GCGGGCCAAGAGGAGAAGGG | 59 |
| DMAP1_3 | GACCCAGGTGCGGAAGTGCG | 60 |
| DPY30_1 | GAGTGGGACAGTCCACGACT | 61 |
| DPY30_2 | GTGCTCCCGCGCCCAGGTGG | 62 |
| DPY30_3 | GATTTCAACACGAAGACTCC | 63 |
| EED_1 | GAGAAGAGGCGAAACTCAAA | 64 |
| EED_2 | GCTGAAACGTCTTTGGAAGG | 65 |
| EED_3 | GTAAGGTCCGTTGGATTAAG | 66 |
| ELP2_1 | GGACTCCCCGCACCCGGTTT | 67 |
| ELP2_2 | GTCATAGAGCACCACGGAGC | 68 |
| ELP2_3 | GGTGCCACCATGTCGCCAAC | 69 |
| ELP3_1 | GAAGCGGAAAGGTGCGAAAG | 70 |
| ELP3_2 | GCCTGGGCGTTCGCCCCTTT | 71 |
| ELP3_3 | GCAGCCACAAACTCAGACCA | 72 |
| ELP4_1 | GCCAGCGTGACCAACGACAG | 73 |
| ELP4_2 | GGTAGTGTTGCCGCGAGTAC | 74 |
| ELP4_3 | GCAACGTCACCAGTTTCCAG | 75 |
| EP400_1 | GCGTCAGGAGGGCGGGAGGA | 76 |
| EP400_2 | GGTAAGTGAGGGCGGAGGCG | 77 |
| EP400_3 | GGCTACGCGACCCCGGACCC | 78 |
| EPC1_1 | GGCACTAACACCAGCCGGGA | 79 |
| EPC1_2 | GCTGCCGGGGACTTGAGGGG | 80 |
| EPC1_3 | GTTGGCTGAAGAGCGCACAG | 81 |
| EZH1_1 | GTGAGTAAACAAGCCTGGGC | 82 |
| EZH1_2 | GGAAATTGGAAGGAATCCGA | 83 |
| EZH1_3 | GGCGCCCCTCCTCATTCCGA | 84 |
| EZH2_1 | GGATTTCGGGGTGCGTCGTG | 85 |
| EZH2_2 | GCTGCCCTCGCCGCCTGGTC | 86 |
| EZH2_3 | GGGGATGTACACAATGAAGT | 87 |
| HCFC1_1 | GAAAGGAGCAACAAGCGCCG | 88 |
| HCFC1_2 | GGGCTACGACTGAGGAAGGG | 89 |
| HDAC1_1 | GGGACGGGAGGCGAGCAAGA | 90 |
| HDAC1_2 | GGCTGAGGCTGGAGCGCCGA | 91 |
| HDAC1_3 | GCTCGGAGAGGAGGCTGCGA | 92 |
| HDAC2_1 | GGCTCGGTACCACCCGGCAG | 93 |
| HDAC2_2 | GGCGATAGTCCCGCGGGGAA | 94 |
| HDAC2_3 | GGCACCAACTCGCGAGGAGG | 95 |
| IKBKAP_1 | GTTTGGGCAGATGGGCAAGA | 96 |
| IKBKAP_2 | GCCTGGCACCGTAGAGGTAG | 97 |
| IKBKAP_3 | GGCGAGGCCGGGCCCGCTTC | 98 |
| ING3_1 | GAGGGAACAAGGGGGTCCAG | 99 |
| ING3_2 | GGAAAGTGAGTGCGCGGCGC | 100 |
| ING3_3 | GAGTTTTGTCCCCTCCAATA | 101 |
| INO80_1 | GGGGTCCCAGGAGCCGCGGA | 102 |
| INO80_2 | GGTTCGCTCTCTGAGGCCGT | 103 |
| INO80B_1 | GAAAGGGGACTAGAAATGGT | 104 |
| INO80B_2 | GCGGCGTGGGAGCACCTCTG | 105 |
| INO80B_3 | GCGAATAGATCAAGCAATTT | 106 |
| INO80C_1 | GAAGACTCGGAGTGCGATGG | 107 |
| INO80C_2 | GTTCCGGACTATTCCGGGAG | 108 |
| INO80C_3 | GGAAGTTCCAAGGCCCGCGC | 109 |
| INO80D_1 | GGCTGACAGATCAGAGTGAG | 110 |
| INO80D_2 | GGAGCCCGGGGATGTGGGCC | 111 |
| INO80E_1 | GGTAGCGGGAGGGCAGACTC | 112 |
| INO80E_2 | GTCATGAACGGGCCGGCGGA | 113 |
| INO80E_3 | GTGCTGCCGCGGGAAGGCTG | 114 |
| JARID2_1 | GACTCGGCGAGCCCTCGCTG | 115 |
| JARID2_2 | GTTACATCTTGGAAAAGAAA | 116 |
| JARID2_3 | GGGGGGGGAGTGAAGGGCGT | 117 |
| KAT5_1 | GCAAGACTGCCCCTGTGACT | 118 |
| KAT5_2 | GCCTCACGAAGCCCCTGTAG | 119 |
| KAT5_3 | GCCACTGGCTGTGCACGTTA | 120 |
| KDM1A_1 | GACAGAGCGAGCGGCCCCTA | 121 |
| KDM1A_2 | GGCGGCCCGAGATGTTATCT | 122 |
| KDM1A_3 | GCGTGAAGCGAGGCGAGGCA | 123 |
| KDM2B_1 | GCTCGGCTTCCATACCTATA | 124 |
| KDM2B_2 | GCGGACCCGCCATGTGGAGG | 125 |
| KDM2B_3 | GTCGGCCACACAGGTAATGT | 126 |
| KDM6A_1 | GCAGCCACAGGCGGGGACGG | 127 |
| KDM6A_2 | GAAAGCCGCCGCTGCCGACC | 128 |
| KDM6A_3 | GGAGCACTGAGGGGATTCGT | 129 |
| KMT2A_1 | GAGGCGGCGGCCGCTCCCCC | 130 |
| KMT2A_2 | GGCCGGCCCTGAAGAGGCTG | 131 |
| KMT2A_3 | GGCGCTTCCCCGCCCGACCC | 132 |
| KMT2D_1 | GATAAAGATTCAGAACCGGC | 133 |
| KMT2D_2 | GTGCCAGGACCAGAAATGTA | 134 |
| KMT2D_3 | GAGATTATCCAAAACCTGAG | 135 |
| LEO1_1 | GTGAGCGATAATGGCGGATA | 136 |
| LEO1_2 | GCGAAGCTGAGCGTAAAGGT | 137 |
| LEO1_3 | GCGTGGCAGGCCTTCCGCTG | 138 |
| MBD2_1 | GGATTCCAAGGGCTCGGTTA | 139 |
| MBD2_2 | GGGCTGGATGCGCGCGCACC | 140 |
| MBD2_3 | GGACCTAAGAGGCGGTGGCC | 141 |
| MBD3_1 | GGAAGAAGTGCCCAGAAGGT | 142 |
| MBD3_2 | GAGCCCGTTGAGGCCCTGCG | 143 |
| MBD3_3 | GCGCAATGGAGCGGAAGAGG | 144 |
| MED1_1 | GATCAATCTGAAGTCCCCGG | 145 |
| MED1_2 | GGCTCGGGATCCCGGGACGC | 146 |
| MED1_3 | GAAGCTAGATCCGCCACAAA | 147 |
| MED10_1 | GGAGAAGTTTGACCACCTAG | 148 |
| MED10_2 | GTTGAGCCCGGCCTGGCTGC | 149 |
| MED10_3 | GGTCTCCCCAGGGCCTGGCC | 150 |
| MED12_1 | GCGGCCGAGAGACAACAAGG | 151 |
| MED12_2 | GAGGGAGCCGAAAAGGGGGG | 152 |
| MED12_3 | GTAGCGCCGGAGGCACCAGC | 153 |
| MED13_1 | GCCGGCGGCGGCTGCTGTGA | 154 |
| MED13_2 | GGTTACAGTGACAATCTTCC | 155 |
| MED13_3 | GGTGCGCCCTTGGGCCGTGG | 156 |
| MED14_1 | GACTCTGCCCGCTCCCGTTT | 157 |
| MED14_2 | GTGTGCCGTTGCGCCAAGCC | 158 |
| MED14_3 | GTGGTTCTCCAGCTGCACTG | 159 |
| MED15_1 | GATACGGGCGGCGGGAGCTG | 160 |
| MED15_2 | GGTCAGTCAAATGTGAGTAG | 161 |
| MED15_3 | GCCGCCTCAGTCACAGAGCC | 162 |
| MED17_1 | GGGAGCTTGCGGTGCGTTCT | 163 |
| MED17_2 | GCGTTGCGTTCGGTTTCCCG | 164 |
| MED17_3 | GAGGCTTCCCTGCGGAGAGC | 165 |
| MED23_1 | GGAATATAGGGGCAGAGGGG | 166 |
| MED23_2 | GGCGGGGGTGATAGTACAGA | 167 |
| MED26_1 | GGCGGCTCCTCCTCCTCCTT | 168 |
| MED26_2 | GTCACTCACTCGCCGGCCTC | 169 |
| MED26_3 | GGCGTCTCCGCAGCAGATCA | 170 |
| MED4_1 | GCGGCTGCTGTCTGCGCTTG | 171 |
| MED4_2 | GGCGAGCCTGAGAGCCGGGC | 172 |
| MED4_3 | GGAGCGGCTGGGAGGCGGTT | 173 |
| MED6_1 | GTTTCGCTAGATCACAGCCT | 174 |
| MED6_2 | GATTGTCTGTGGACCAGTTT | 175 |
| MED6_3 | GCGTTTACAGGTTCTCTTTC | 176 |
| MED7_1 | GAAAGACGAAAGACCGCCTT | 177 |
| MED7_2 | GTGCGGTCTCTCCGAGAGCG | 178 |
| MED7_3 | GGCTCTAAGCGTGGCAGTCT | 179 |
| MED8_1 | GACCGAGAGTGGGCTGGCTA | 180 |
| MED8_2 | GGCAGAACCCACGGCTGATA | 181 |
| MED8_3 | GCGTTGGGCGTACTAGCGGC | 182 |
| MEN1_1 | GTGGGATGTAAGCGCGGAGG | 183 |
| MEN1_2 | GACAGACTTTACAGCCCCGG | 184 |
| MEN1_3 | GGACTCTCCTTGGGGTTTGG | 185 |
| MRGBP_1 | GCTCGGCCGGGCCGCGGCCA | 186 |
| MRGBP_2 | GCCGCAGGCGACAAGGGCCC | 187 |
| MRGBP_3 | GACAGTGGTGTGGAGCCCCG | 188 |
| MTA1_1 | GCCGCCAACATGTACAGGGT | 189 |
| MTA2_1 | GTTGGGCTCTGCCGGCCGCA | 190 |
| MTA2_2 | GAACGAGCTCGGCTCCTGCC | 191 |
| MTA2_3 | GCCTCAGCGTCCCGGAGTG | 192 |
| MTA3_1 | GCCCCAGAACGTGGGGGCCG | 193 |
| MTA3_2 | GTCCAGGCGCGCTACACGTT | 194 |
| MTA3_3 | GGGGAGGAACGCCTTGTCAC | 195 |
| NCOA6_1 | GTCGGGCTGGCTTCGCGGGG | 196 |
| NCOA6_2 | GACCGTGCCACTCGGTCGCC | 197 |
| NCOA6_3 | GACGGCGGCGCGGGCCCGTA | 198 |
| OGT_1 | GCTCTGGAGGGCTTGAGCGG | 199 |
| OGT_2 | GCTCCAGATGGCGTCTTCCG | 200 |
| OGT_3 | GATGGTCAATTAGAGTTCCC | 201 |
| PAF1_1 | GTGAACGCGCAGGCAGCACC | 202 |
| PAF1_2 | GCGGAAAGTGGGTTGAGATG | 203 |
| PAF1_3 | GCGGCCTGAGGAGACCCGTT | 204 |
| PBRM1_1 | GGGTAAGGCCGGGCCCAGGG | 205 |
| PBRM1_2 | GGCCCGGCAGCTGACCAAGG | 206 |
| PBRM1_3 | GCAGGTGCGACAAGGCTACT | 207 |
| PCGF1_1 | GCCTCATCGCGATCGCAATC | 208 |
| PCGF1_2 | GATGGACCCGCTACGGAACG | 209 |
| PCGF1_3 | GTCGGCCAGCGGTGCGAATT | 210 |
| PCGF2_1 | GCTTACCTGGGTTCGGGGTC | 211 |
| PCGF2_2 | GCCTGTAACCCTCTGGGGAT | 212 |
| PCGF2_3 | GGGGGGTGCGAAGGCAGGAT | 213 |
| PCGF6_1 | GTAGGCGCTGCCAAAACCGA | 214 |
| PCGF6_2 | GGCGCCTCTGTCTGAGACGG | 215 |
| PCGF6_3 | GGTGTCTCTCCCGACCATGG | 216 |
| PHC1_1 | GAAGGTAACCGGGCGACCGA | 217 |
| PHC1_2 | GGGCGTTACACAGATGGAGG | 218 |
| PHC2_3 | GCTCAGCGCCGGAGGTAGGC | 219 |
| PHC2_1 | GACTGGCAGCTCATTCTCCA | 220 |
| PHC2_2 | GTACACAGAAATCTGGGGCC | 221 |
| PHC2_3 | GGTAAGAGTCTAATTGATCT | 222 |
| PHC3_1 | GTGACTGATGTCGTAACTAG | 223 |
| PHF10_1 | GGGCCCACGCCCCGGCACCC | 224 |
| PHF10_2 | GTCGCTGTCGCACGGCCGCG | 225 |
| RBBP4_1 | GGCACCCTCACCTTCCTTGT | 226 |
| RBBP4_2 | GCTGAGCCGCGGCCTCGACA | 227 |
| RBBP4_3 | GGGGGCGCAGGAAACAATAG | 228 |
| RBBP5_1 | GTTGTTGCCGGAGCTGAGAC | 229 |
| RBBP5_2 | GCTGCGTTTTAGAGAAGCGT | 230 |
| RBBP5_3 | GGTGGACGCCGCGAAGAGAC | 231 |
| RBBP7_1 | GGAGCGCAGCCGCTGGAGGA | 232 |
| RBBP7_2 | GCGCGCGCGTTGACCGCCTC | 233 |
| RBBP7_3 | GCCCTTGTCCGGGGGTTGCT | 234 |
| RTF1_1 | GGCGGGCAAGAGGGGAGTCC | 235 |
| RTF1_2 | GGACCACCATGGTAAAGAAG | 236 |
| RTF1_3 | GCGCGGGCCGGCGGAGCCAG | 237 |
| RUVBL1_1 | GGGCGCACTGTCCTAGCTGC | 238 |
| RUVBL1_2 | GCCTCCCACAGCCACGTGAA | 239 |
| RUVBL1_3 | GCAGGCGGCCTCAGGGCTTG | 240 |
| SAP18_1 | GGTCAGGGCGAGCGTCTCGC | 241 |
| SAP18_2 | GGAGTCGCGCGTTACCCAGG | 242 |
| SAP18_3 | GATCGACCGCGAGAAGGTGA | 243 |
| SAP30_1 | GTGAGCGGGGTCCCCGCTCC | 244 |
| SAP30_2 | GGCCCGGGACAGTTGGTGTT | 245 |
| SAP30_3 | GCAGAGTGAATTGCCGCTGC | 246 |
| SETD1A_1 | GAATAGCCCGCTTCTGTCCC | 247 |
| SETD1A_2 | GCCAGCAGGGATTGGCTAAC | 248 |
| SETD1A_3 | GACTCCACCAAGGCGGATGA | 249 |
| SETD1B_1 | GGTTCCTCCTCTCGCCCGAA | 250 |
| SETD1B_2 | GATTGACCCGGCTCTGAAAA | 251 |
| SETD1B_3 | GCACGGCTGGGGGGGCGCGC | 252 |
| SIN3A_1 | GGGCTAGTCCGCCGGCCGCT | 253 |
| SIN3A_2 | GCTCGGTCCCAGGGCCCGCA | 254 |
| SIN3A_3 | GGCCTGTCCCTCGCCTACCT | 255 |
| SIN3A_4 | GCGGCCGCTTCTCTGTTACC | 256 |
| SIN3A_5 | GCCTGTGACCGCTTCGTTAG | 257 |
| SIN3B_1 | GGGACGCCACTCACGTGCAC | 258 |
| SIN3B_2 | GAGGGCCGAGGTGAGAGGTG | 259 |
| SMARCA4_1 | GGGCGGTTTGAATGGAGCCG | 260 |
| SMARCA4_2 | GGCGCGCCCTGTGCGGGGCC | 261 |
| SMARCA4_3 | GGGAAGGCCACAGTGTCGCG | 262 |
| SMARCB1_1 | GGCCTGGTCGTCGTCTGCGG | 263 |
| SMARCB1_2 | GGGCCGAGGGAAACCGAAGC | 264 |
| SMARCB1_3 | GCGAGGGATCAGGAGGGCTG | 265 |
| SMARCC1_1 | GCTGTTTATCGACGGAAGGA | 266 |
| SMARCC1_2 | GACGGTGTCCCAGCTGGATT | 267 |
| SMARCC1_3 | GGTGGGTTCGCGCGCCCGTG | 268 |
| SMARCC2_1 | GACAACGTGCGGCTGTGGCT | 269 |
| SMARCC2_2 | GACCGCGGCCCTGCAGCCCC | 270 |
| SMARCC2_3 | GCCTCGTAGTACTTCACGTT | 271 |
| SMARCD1_1 | GTGGCTCCAAGCGGCGGCGC | 272 |
| SMARCD1_2 | GCCGCACAAAGAACCGGAAC | 273 |
| SMARCD2_1 | GACTCGGGCGGCCAAACCTC | 274 |
| SMARCD2_2 | GCCCGGGAGATTCCGGATCC | 275 |
| SMARCD2_3 | GGAACTCGCGAACTTGGATT | 276 |
| SMARCD3_1 | GAATGGGAGTCTGCCAGTCA | 277 |
| SMARCD3_2 | GCCAGGCAGCGATGGGGAGG | 278 |
| SMARCD3_3 | GAAAGTGCTCGGCAGGGGGG | 279 |
| SMARCE1_1 | GCGGGTGAGTGTTTCCAAGT | 280 |
| SMARCE1_2 | GAACTCGGGGTCTAGCCAAG | 281 |
| SMARCE1_3 | GGCCTCAAGGAGGCCTCAAC | 282 |
| SRCAP_1 | GTCAGTCCGTCGGGAGGGCT | 283 |
| SRCAP_2 | GCTCGGGTCTTGGGAACGTG | 284 |
| SRCAP_3 | GTGTGAACCCGCAGGAGGCC | 285 |
| SUZ12_1 | GGGCGAGCGGTTGGTATTGC | 286 |
| SUZ12_2 | GGCGGGTAGCTGGCGGGGGG | 287 |
| SUZ12_3 | GCCTCAGAAGCACGGCGGTG | 288 |
| THAP1_1 | GTGATGGTGGCCTCCCTCGG | 289 |
| THAP1_2 | GTTCTCAGTGTCGCTGCGCT | 290 |
| THAP1_3 | GCTAATGCAAACAACAAAAC | 291 |
| THAP3_1 | GCTGCCCCCAACAAAGATGG | 292 |
| THAP3_2 | GGGTCCCCGCCTCTTACCGG | 293 |
| THAP3_3 | GGGCCCGCGGACCGACTCCG | 294 |
| THOC1_1 | GCTTCGGGCAAACTGAAGAG | 295 |
| THOC1_2 | GGCAAAATTCGAGTAATTTC | 296 |
| THOC1_3 | GTCCGCCTCAGCGTCCGCTC | 297 |
| THOC2_1 | GAGGCGAATTGTGAGTGTTC | 298 |
| THOC2_2 | GCTGCACTCTCACCTGTAGT | 299 |
| THOC2_3 | GACCATCCACGCCCGCCGCC | 300 |
| THOC3_1 | GCTGCTGCAGTGTTGTGAGT | 301 |
| THOC3_2 | GGCGGTCCCCGCTGCAGCCA | 302 |
| THOC3_3 | GCCCCGGCTCGATGGCCCCG | 303 |
| TRRAP_1 | GGGTCGCGGGCCGGGCCTGC | 304 |
| TRRAP_2 | GGCGGGCGTCCGAACGGCCC | 305 |
| TRRAP_3 | GCGGCCGAGCGGTTGCGACG | 306 |
| WDR5_1 | GGCCGCACAGGAGACAAGGG | 307 |
| WDR5_2 | GCTCTGGCGGCCTCGGTCTC | 308 |
| WDR5_3 | GGCACGCACCTTGCTCTGAG | 309 |
| WDR82_1 | GAGGTGGCTGTGAGGACGAA | 310 |
| WDR82_2 | GGAGGAGGCGGCCCAACTGT | 311 |
| WDR82_3 | GCGGAGCTTCCGCGTCGCTA | 312 |
| DC13_1 | GGGCTGAACGCGTATTCGCG | 313 |
| DC14_1 | GGCGATTCGGCGACCTTAGT | 314 |
| DC14_2 | GGCGCGAGTACGAAATTAAT | 315 |
| DC14_3 | GATTATCAGACGCGCTGCGT | 316 |
| DC15_1 | GCGCGGCTAGAATAGACTTG | 317 |
| DC15_2 | GGTTCGTGCGGTAGTGTGCG | 318 |
| DC15_3 | GTATCGTCTTCCGTCCTCGT | 319 |
| DC15_4 | GGCTACTCTATGCGTCGATT | 320 |
| DC15_5 | GCTTAACAAAGCGAGCGACC | 321 |
| DC15_6 | GGCACTGGACGATATCCGAC | 322 |
| DC15_7 | GTTCATCTCAACGGTAATCG | 323 |
| DC1617_1 | GGTTATATTGACGTCCTGCC | 324 |
| LC_1 | GCTAGTCTGCGTGACGCGTCT | 325 |
| LC_2 | GAAGTAACTGAAGGATCAATAT | 326 |
| LC_3 | GCGGGAAAACCGCGCCCCGGA | 327 |
| LC_4 | GCTCAGGGCCGTGACGCGTGGG | 328 |
| LC_5 | GTAGGAGCGCGTGCTGATTGT | 329 |
| LC_6 | GGACGAACTAATGTATTGTGGC | 330 |
| LC_7 | GGTTTATGGACCTTCAGGGAG | 331 |
| LC_8 | GGCGTACCCGTGGTTTCACCGT | 332 |
| LC_9 | GCTTGGGAGCAAGCCGGCGGTA | 333 |
| LC_10 | GTGTGGCGACCCTGGTCTCAT | 334 |
| LC_11 | GGGCCTCTGTGAGGTCGTGGT | 335 |
| LC_12 | GTATGATACTCGTGCTTAGT | 336 |
| LC_13 | GCGAAGTCGAATGTTGGTCG | 337 |
| LC_14 | GGCCCAACATCCTCGTGTCCA | 338 |
| LC_15 | GTGGCGGAGCCTAGCCGAGAGT | 339 |
| LC_16 | GGCGCGAACTTTAAGGTGGAC | 340 |
| LC_17 | GATTAGTTCGCGTATGGCAGCA | 341 |
| LC_18 | GCCGTAAGGACGGGTAGAGGT | 342 |
| LC_19 | GGGGGCGGAAATCGAGCCCT | 343 |
| LC_20 | GAAGTGAGAGGAGGGAGCAGCC | 344 |
| LC_21 | GTAAATCCCGGAGTCAGA | 345 |
| LC_22 | GTGAGCGGCGACCCCCCCTG | 346 |
| LC_23 | GGTGCGGACCCCCGCCGGGGG | 347 |
| LC_24 | GGTGAGCCGGTTTGTGAGAAG | 348 |
| LC_25 | GAGAGTGCGCTGCAATGGATAT | 349 |
| LC_26 | GGATGTGCCATGGTGAGGGCTG | 350 |
| LC_27 | GGATGCGCCTAGGCGAAAGAAA | 351 |
| LC_28 | GAGCCGATGCAGGGCGTAGGG | 352 |
| LC_29 | GCCATTCTCTATGTTCGATAAG | 353 |
| MCM2_PC | GGATCGTGGTACTGCTATGG | 354 |
| INTS9_PC | GGCAGGTGGCGGAGATTGCAC | 355 |
| GEMIN5_PC | GGCGTGAGGCTACGAGCGGT | 356 |
| CENPA_PC | GCCAAGCACCGGCTCATGTG | 357 |
| POLR1D_PC | GGAAGCAAGGACCGACCGA | 358 |

TABLE 6
Regular primers for cloning and sequencing
primers to clone single sgRNA:

| | |
|---|---|
| Forward | GGAGAACCACCTTGTTGGN19GTTTAAGAGCTATG |
| primer | CTGGAAACAGCA (SEQ ID NO: 359) |
| (N19 is the | |
| targeting | |
| sequence): | |
| Reverse | CTAGTACTCGAGNNNNNNNNNNGCGTCGACCCTAG |
| primer | GGCTAGCACTAGTAAAAAAAGCACCGACTCGGTGC |
| (N10 is the | CAC (SEQ IDNO: 360) |
| barcode | |
| sequence): | |

PRIMERS TO AMPLIFY GENOMIC DNA FOR SINGLE
SCREENS:

| | |
|---|---|
| Forward | AATGATACGGCGACCACCGAGATCTACACGGTAAT |
| primer: | ACGGTTATCCACGCGG (SEQ ID NO: 361) |
| Reverse | CAAGCAGAAGACGGCATACGAGATNNNNNNNNGCA |
| primer | CAAAAGGAAACTCACCCT (SEQ ID NO: 362) |
| (NNNNNNNN | |
| is the | |
| index): | |

CUSTOM PRIMERS FOR M1SEQ:

| | |
|---|---|
| Read2 | GTGTGTTTTGAGACTATAAGTATCCCTTGGAGAAC |
| primer: | CACCTTGTTGG (SEQ ID NO: 363) |
| Index read | GTCTCAAAACACACAATTACTTTACAGTTAGGGTG |
| primer: | AGTTTCCTTTTGTGC (SEQ ID NO: 364) |

PRIMERS TO AMPLIFY GENOMIC DNA FOR DOUBLE
SCREENS:

| | |
|---|---|
| Forward | AATGATACGGCGACCACCGAGATCTACACTGAGAC |
| primer: | TATAAGTATCCCTTGGAGA |
| | (SEQ ID NO: 365) |
| Reverse | CAAGCAGAAGACGGCATACGAGATNNNNNNCTGGC |
| primer | GAACTACTTACTCTAGCTTCCCGGCAACGCCTTAT |
| (NNNNNN | TTAAACTTGCTATGCTGT |
| is the | (SEQ ID NO: 366) |
| index): | |

CUSTOM PRIMERS FOR H1SEQ-2500:

| | |
|---|---|
| Read1 | CGAAGTTATAAACAGCACAAAAGGAAACTCACCCT |
| primer: | AACTGTAAAGTAATTGTGTG |
| | (SEQ ID NO: 367) |
| Index read | GTTTAAATAAGGCGTTGCCGGGAAGCTAGAGTAAG |
| primer: | TAGTTCGCCAG (SEQ ID NO: 368) |
| Read2 | GCACCGACTCGGTGCCACTTTTTCAAGTTGATAAC |
| primer: | GGAC (SEQ ID NO: 369) |

TABLE 7
qPCR primer sequences

| Gene | | |
|---|---|---|
| name | Forward primer | Reverse primer |
| SIN3B | TTACTGCATGTCCAAGTTCAAGA | CCAGGTGTCGTTCAGTA |
| | (SEQ ID NO: 370) | CCC |
| | | (SEQ ID NO: 371) |
| MED4 | GGTGGTAACAGCACACGAGA | TTGCCAGCATTTCTATA |
| | (SEQ ID NO: 372) | AGTTCC |
| | | (SEQ ID NO: 373) |
| MED6 | TGCAGAGGCTAACATTAGAACAC | GCTGTTGCTTCCGAATG |
| | (SEQ ID NO: 374) | ATGA |
| | | (SEQ ID NO: 375) |
| MRGBP | TGAACCGACACTTCCACATGA | TGGTCCCAGATGACCTT |
| | (SEQ ID NO: 376) | GGAT |
| | | (SEQ ID NO: 377) |

### Example 3

### Repression Screening Platform

[0239] Besides gene activation, gene repression also can facilitate cell fate conversion. For example, knockdown of many epigenetic modulators increases the efficiency of reprogramming or transdifferentiation processes. This example describes, a repression screen platform to identify cell fate conversion barriers genes.

[0240] To perform gene repression screens, a clonal mouse ES cell line carrying Staphylococcus aureus (SaCas91-KRAB is co-transfected with Cas9, sgRNA targeting mouse Rosa 26 loci, and a vector containing dCas9-KRAB with a Zeocin-resistance gene. Zeocin-resistant cells are sorted into a 96-well plate. After a week of culture, the genome is purified and the correct integration of SadCas9-KRAB into Rosa 26 loci is confirmed. This clonal cell is used as a platform to identify gene barriers of differentiation processes.

[0241] To perform single gene repression screens, a genome-wide gene repression SadCas9 sgRNA library is generated. The library includes sgRNAs targeting −50 bp to +300 bp region relative to all putative genes in the mouse genome. All the available sgRNAs are blasted through mouse genome and excluded if there is predicted off-target binding. Other design criteria and construction method are similar to the design of activation sgRNA library described in Example 1. This repression library is transduced into the SadCas9 repression mouse ES cells, and neural differentiation is performed as in the single screen. On day 12, cells are harvested and sorted for hCD8+ and hCD8−. The sgRNAs are sequenced, paired-analyzed for enriched genes in hCD8+ and hCD8− populations, and a list of top hits for neural differentiation barrier genes is identified.

[0242] Over the past years, the literature has shown that the activation of combinatorial transcription factors can control a cell fate. For example, the transcription factors Oct4, Klf4, Sox2, and c-Myc are used to reprogram somatic cells to induced pluripotent stem (iPS) cells. Moreover, activation of combinatorial transcription factors also induces the generation of many cell types, such as cardiomyocytes, neurons, and hepatocytes, directly from somatic cells. These works indicate that single TFs are not sufficient to achieve a cell fate conversion process in most cases. Thus, a platform that allows combinatorial screen is in urgent need to facilitate cell fate determination studies.

[0243] To perform a second-round combinatorial activation screen, an sgRNA library that achieves double gene activation is generated. In this library, two different sgRNA cassettes are constructed into one vector. The first cassette contains sgRNAs targeting top hit genes from the single activation screen, which are driven by a human U6 promoter. Meanwhile, each vector contains the second cassette, which is a sgRNA with a different stemloop sequence driven by a mouse U6 promoter. The sgRNAs of the second cassettes also target top hit genes from the first round activation single screen. This construct expresses sgRNAs targeting two different genes, as well as avoids recombination of repeated sgRNA sequences. Two different sgRNAs bind to dCas9 and achieve the activation of two different top hit genes simultaneously in the dCas9-activation system. This allows the combinatorial double activation screen.

[0244] In some embodiments, this double activation library is transduced into CamES cells, and neural differentiation is performed as in the single screen. On day 12, cells are harvested and sorted for hCD8+ and hCD8−. The sgRNAs are sequenced and paired-analyze enriched genes in hCD8+ and hCD8− populations are identified. The screen identifies optimal TF combinations that drive neural differentiation of mouse ES cells.

[0245] Additionally, the combination of gain-of-function and loss-of-function techniques accelerates cell fate conversion, and sheds light on the fully revelation of cellular reprogramming mechanisms. However, a platform to perform gain-of-function and loss-of-function screen simultaneously is not available at present.

[0246] To perform a simultaneous activation/repression screen, a clonal ES cell line carrying gene activation/repression cassettes is generated. Vectors containing two cassettes separately are constructed. One vector contains the activation cassette, which is a dead Streptococcus pyogenes Cas9 (SpCas9)-activation system, with a eGFP gene cassette. The other vector comprises SadCas9-KRAB, with a zeocin-resistance gene cassette following. The two vectors, together with Cas9 and sgRNA targeting mouse Rosa26 loci are co-transfected into mouse ES cells. To select mouse ES cells carrying these two system, transfected ES cells are selected with zeocin. After seven days, remaining zeocin-resistant cells are analyzed with flow cytometry and single GFP+ cells are sorted into 96-well plates. One week later, the genome of clonal cells is analyzed to confirm the correct integration of both activation and repression cassettes. This clonal cell line allows the activation and repression of different genes simultaneously.

[0247] An sgRNA library that achieves gene turning-on and -off simultaneously is constructed. In this library, two different sgRNA cassettes are constructed into one vector. The first cassette contains sgRNAs of SpCas9 targeting top hit genes from the single activation screen, which are driven by a human U6 promoter. Meanwhile, each vector contains the second cassette, which is a sgRNA of SaCas9 driven by a mouse U6 promoter. The sgRNAs of SaCas9 in the second cassettes target top hit genes from the first round repression screen. This construct expresses sgRNAs of SpCas9 and SaCa9, and thus allows simultaneous gene activation and repression.

[0248] This activation/repression library is applied to clonal turning-on/off mouse ES cells, and neural differentiation is performed as in the single screen. On day 12, cells are harvested and sorted for hCD8+ and hCD8−. The sgRNAs and paired-analyze enriched genes in hCD8+ and hCD8− populations are sequenced. A series of gene combinations having both TF determinants and neural differentiation barriers is identified. The simultaneous turning-on of IT determinants and turning-off of neural differentiation barriers generates very high efficiency of neural cells of mouse ES cells.

### Example 4

### Experimental Procedures

### Plasmid Design and Construction

[0249] To clone sgRNA vectors, the optimized sgRNA expression vector (pSLQ1373) was linearized and gel purified (Chen et al., 2013). New sgRNA sequences were PCR amplified from pSLQ1373 using different forward primers and a common reverse primer, gel purified and ligated to the linearized pSLQ1373 vector using In-Fusion cloning (Clontech). Primers used to construct individual sgRNAs are shown in Table 8. To change the promoter of scFv-sfGFP-VP64, the EF1α and PGK promoters were PCR amplified, gel purified, and ligated to linearized pSLQ504 using In-Fusion cloning (Clontech).

[0250] Two-guide expression vectors were assembled by a two-step cloning procedure. First, new sgRNA sequence (integrated DNA Technologieds) were PCR amplified from pSLQ5004 and ligated into BstXI and XhoI-digested pSLQ5004 parental vector, which contained a modified human 136 promoter (hU6). The same single sgRNA expression constructs were cloned into pSLQ1373 as previously described, which contained a modified mouse U6 promoter (mU6) and an optimized stem loop sequence of sgRNA. Second, the two-guide expression cassettes were then assembled from PCR amplified single cassettes using two sgRNA forward and reverse primers from pSLQ5004-based single sgRNA constructs and inserted into NsiI-digested pSLQ1373 single sgRNA constructs. Primers used to construct individual sgRNAs are shown in Table 11.

sgRNA Library Design

[0251] Putative transcription factor (TF) genes were selected according to the TRANSFAC database, and TSS (transcription start site) for each gene was determined using the Gencode and refFlat databases. All possible transcripts were selected if multiple TSSs exist for a gene. All sgRNAs targeting −3 kb to 0 relative to TSS were kept. Using the CRISPR-era algorithm (Liu et al., 2015), the targeting sequences of sgRNAs adjacent to an NGG PAM (protospacer adjacent motif) were computed, starting with a G (for more efficient U6 promoter activity) with a length of 20 bp. The sgRNAs containing homopolymers spanning greater than 3 nucleotides (nt) were discarded. To avoid off-target effects, sgRNA sequences alignment to the mouse genome was computed using the short read aligner Bowtie, and those with less than 2 mismatches with another genomic region were excluded. Furthermore, sgRNA sequences that contained certain restriction sites (BstXI and BlpI) were also removed. sgRNAs with a GC content between 30% and 70% were kept. An average of about 60 sgRNAs were selected for each target gene. Sequences for non-targeting negative control sgRNAs were generated using a randomized mouse gene TSS region and selected using the same rules as described above.

[0252] sgRNA Library Construction

[0253] The oligonucleotide pool was synthesized by Custom Array. The oligo library was PCR amplified, gel purified and ligated to the linearized backbone vector (pSLQ1373) digested with BstXI and BlpI using In-Fusion cloning. Libraries and parental vector will be made available on addgene.org.

### Cell Culture

[0254] E14 mouse ES cells and CamES cells were maintained on gelatin coated tissue culture plates with basal medium (50% Neurobasal, 50% Dulbecco modified Eagle medium (DMEM)/Ham's nutrient mixture F12, 0.5% NEAA, 0.5% Sodium Pyruvate, 0.5% GlutaMax, 0.5% N2, 1% B27, 0.1 mM β-mercaptoethanol and 0.05 g/L bovine albumin fraction V; all from Thermo Fisher Scientific) supplemented with LIF (Millipore) and 2i (Stemgent). Human embryonic kidney (HEK293T) cells (ATCC) were cultured in 10% fetal bovine serum (Thermo Fisher Scientific) in DMEM (Thermo Fisher Scientific).

### Construction of the CamES Cell Line

[0255] Mouse ES cells were co-transduced with multiple lentiviral constructs that expressed dCas9-SunTag from a TRE3G promoter, scFV-sfGFP-VP64 from the EF1a or PGK promoter, and reverse tetracycline-controlled transactivator (rtTA) from the EF1a promoter. After adding Doxycycline, polyclonal cells were sorted by flow cytometry using a BD FACS Aria2 for GFP+ and mCherry+ cells. After verification of gene activation using a sgBrn2, monoclonal cells were further sorted, and one efficient cell line was chosen as CamES cells.

### Construction of the Tuj-1-hCD8 CamES Cell Line

[0256] Construction of CRISPR/Cas9 vector for Tuj1 knockin. The pX330-derived pSLQ1654 encoding the nuclease Cas9 and an optimized sgRNA sequence was first linearized by a BbsI digest and gel purified. Two primers sgTuj-1 F and sgTuj-1 R were phosphorylated, annealed, and ligated to the linearized vector pSLQ1654 to generate pSLQ1654-sgTuj1. sgTuj-1 F: caccgcccaagtgaagttgctcgcagc. sgTuj-1 R: aaacgctgegagcaacttcacttgggc.

[0257] Construction of DNA template. The Tuj1-IRES-hCD8 vector (pSLQ1760) was assembled with three fragments (5′ homologous arm of Tuj1, IRES-hCD8 and 3′ homologous arm of Tuj1) and a modified pUC19 backbone vector by using Gibson Assembly Master Mix (New England Biolabs). Both 5′ and 3′ homology arms were PCR amplified from the genomic DNA extracted from mouse ES cells with Herculase 11 Fusion DNA polymerase (Agilent). The IRES-hCD8 was PCR amplified from pSLQ1729. The backbone vector was linearized by digestion with PmeI and ZraI. All DNA fragments and the backbone vector were gel purified followed by a Gibson assembly reaction. Primers: 5′ homologous arm F: aaagtgccacctgacactcagtcctagatgtcgtgegg (SEQ ID NO:380). 5′ homologous arm R: tcacttgggcccctgggct (SEQ ID NO:381). IRES-human CD8 F: caggggcccaagtgaactagtaaaattcgcccctctccctc (SEQ ID NO:382). IRES-human CD8 R: cagctgcgagcaactttaacctgcaaaaagggagcagtaaagg (SEQ ID NO:383). 3′ homologous arm F: agttgctcgcagctggggt (SEQ ID NO:384). 3′ homologous arm R: agctggagaccgttttttctgactgactggalacagggcat (SEQ ID NO:385).

[0258] Electroporation and clonal Tuj1-hCD8 CamES cells: 2.5 μg pSLQ1654-sgTuj1, 12.5 μg Tuj1-IRES-hCD8 template DNA in 100 μL Nucleofector solution (Amaxa) were electroporated into 1×10⁶ CamES cells using program A-030. Both plasmids were maxiprepped using the Endofree Maxiprep Kit (Qiagen). After 3 days of culture, sorted single cells were seeded in a 96-well plate with one cell per well. All clonal cell lines were analyzed using PCR and sequencing (Yu et al., 2015).

### Lentiviral Production

[0259] HEK293T cells were seeded at ˜30% confluence one day before transfection. Lentivirus were produced by cotransfecting with pHR plasmids and encoding packaging protein vectors (pMD2.G and pCMV-dR8.91) using TransIT-LT1 transfection reagents (Mirus). Viral supernatants were collected 3 days after transfection and filtered through 0.45 μm strainer. Supernatant was used for transduction immediately or kept at −80° C. for long-term storage.

### Quantitative RT-PCR

[0260] Cells were harvested using Accutase (STEMCELL), and total RNA was isolated using the RNeasy Plus Mini Kit (QIAGEN), according to manufacturer's instructions. Reverse transcription was performed using iScript cDNA Synthesis kit (Bio-Rad). Quantitative PCR reactions were prepared with iTaq Universal SYBR Green Supermix (Bio-Rad). Reactions were run on a LightCycler thermal cycler (Bio-Rad). Primers used are summarized in Table 9.

### High-Throughput Pooled Neural Differentiation Screens

[0261] The neural differentiation screens were performed as two independent replicates. For both screens, 10⁸ CamES cells were seeded at 40,000 cells/cm² density at day −2. Cells were transduced with pooled lentiviral sgRNA library with an MOI of 0.3 at day −1 in basal medium supplemented with LIF and 2i. At day 0, puromycin was added at 1 μg/mL in ES2N medium (Millipore) with Doxycycline for another 24 hours. Fresh ES2N medium was changed with Doxycycline every day starting day 2. On day 12, cells were harvested and sorted for hCD8+ and hCD8− cells using EasySep human CD8 isolation kit (STEMCELL Technologies). Populations of cells expressing this library of sgRNAs were either harvested at the outset of the experiment (the day 0 time point: after 24 hours puromycin selection), hCD8+, or hCD8− cells. Genomic DNA was harvested from all samples; the sgRNA-encoding regions were then amplified by PCR using HiSeq forward and reverse primers and sequenced on an lllumina HiSeq-4000 using HiSeq custom primer with previously described protocols at high coverage (Bassik et al., 2013; Kampmann et al., 2014). Primers used are summarized in Table 12.

[0262] For the individual sgRNA validation experiments, a similar protocol was used, except that CamES cells were cultured in basal medium seeded at 5,500 cells/cm⁷ after puromycin selection and transduced with a high MOI. Top 100 hits are summarized in Table 10.

Combinatorial sgRNA Library Construction

[0263] A library of 44 sgRNAs including a set of 19 genes was designed by using the top prediction hits from the single screens and six nontargeting negative-control sgRNAs. Any sgRNAs containing NsiI restriction sites, which were used for combinatorial sgRNA library construction, were excluded. Individual oligonuclotides encoding sgRNAs were synthesized in a 96-well format (Integrated DNA Technologieds), and cloned into pSLQ1373 individually as previously described. At the same time, the same sgRNA sequence was synthesized (Integrated DNA Technologies) using different forward sequence. These sgRNAs were cloned into pSLQ5004 individually as previously described. After sequencing validation, all pSLQ1373-sgRNA constructs were manually mixed and all pSLQ5004-sgRNA constructs separately mixed in equal amounts for combinatorial sgRNA library construction. To generate the pooled combinatorial sgRNA library, the sgRNA sequence were PCR amplified using two sgRNA forward and reverse primers from pooled pSLQ5004-sgRNA constructs, gel purified and ligated into the NsiO-digested pooled pSLQ1373-sgRNA constructs using In-Fusion cloning (Clontech). The combinatorial sgRNA-library pools were prepared in Stellar competent cells (TaKaRa) and purified with a Plasmid Maxi Kit (Qiagen). The representation of each of the double-sgRNA constructs was then quantified by NGS with the oligonucleotides listed in Table 11.

### High-Throughput Pooled Combinatorial Screens

[0264] The double neural differentiation screens were performed as two independent replicates. For both screens, 6 millions CamES cells were seeded at 40,000 cells/cm² density at day −1. Cells were transduced with pooled lentiviral double sgRNA library with an MOI of 0.3 at day 0 in basal medium supplemented with LIF and 2i. At day 1, puromycin was added at 1 μg/mL in basal medium with Doxycycline for another 24 hours. Fresh basal medium was changed with Doxycycline every day starting day 2. On day 12, cells were harvested and sorted for CD8+ and CD8− cells using Aria II cell sorter (BD Biosciences). Genomic DNA was harvested from all samples; the double sgRNA-encoding regions were then amplified by PCR using MiSeq forward and reverse primers and sequenced on an Illumina Miseq using HiSeq custom primer, which for the first sgRNA, and MiSeq custom primer, which for the second sgRNA. Primers used are summarized in Table 12.

[0265] For the individual double sgRNA validation experiments, a similar protocol was used, except that CamES cells were transduced with a high MOI.

### Primary Neurons Culture, Primary Astrocytes Culture and Induced Neurons Replating

[0266] Primary cultures of cortex neurons were prepared from postnatal day 1 wild-type black rat. Rats were decapitated, and their brains were removed in pre-cooled physiological saline. The cortex was dissected. Tissues were slightly minced and placed into a Papain Dissociation solution (Worthington Biochemical Corporation) containing 20 units/ml papain and 0.005% DNase in Earle's Balanced Salt Solution (Thermo Fisher Scientific). The solution was equilibrated in 95% O2, 5% CO2 before the tissue was incubated at 37° C. for 1 hour. After incubation, the tissue and solution mixture was triturated. Undissociated tissue was allowed to settle and the cloudy suspension was removed and centrifuged at 300×g for 5 minutes. The supernatant was then discarded and the cell pellet was resuspended in a DNase/albumin-inhibitor solution. A discontinuous density gradient was prepared by gently layering the cell suspension on top of an albumin-inhibitor solution in a centrifuged tube. The mixture was centrifuged at 145×g for 5 minutes. The supernatant was discarded and the neurons were resuspended in Neurobasal (Invitrogen) medium containing 2% B27 supplement, 2 mM glutamine and 0.5% penicillin/streptomycin. A total of 250,000 cells were plated onto a well of 24-well plates that had been pre-treated with 12.5 μg/ml poly-D-lysine (Sigma). The plates were incubated at 37° C. in a 5% CO2/95% air incubator and half of the medium was changed every three days.

[0267] Rat Primary Cortical Astrocytes (Thermo Fisher Scientific) were cultured and plated according to manufacturer's instructions. The astrocytes were fed every three days with fresh medium.

[0268] One week after culturing primary neurons and astrocytes, the induced neurons were gently removed from the dishes by trypsin dissociation and were replated onto primary neurons or astrocytes. Electrophysiological recordings were performed between day 14 and day 21 after replating.

### Generation of Induced Neurons

[0269] Preparation Before Induction
[0270] 1. Embryonic skin-derived fibroblasts were isolated from E13.5 embryos of C57BL/6 mice as previously described (2010 nature, Vierbuchen et al.). Isolated fibroblasts were cultured and expanded in MEF media (Dulbecco's Modified Eagle Medium, Life Technologies) containing 10% Fetal Bovine Serum (Life Technologies), non-essential amino acids (Life Technologies), and sodium pyruvate (Life Technologies)) for 2 passages before use. Tail tip fibroblasts were isolated from the bottom third of tails from 4-day-old pups as previously described. Tail tip cells were expanded for 2 passages in MEF media before use.
[0271] 2. Matrigel (growth factors reduced; BD Biosciences) was thawed on ice according to the manufacturer's instruction and dilute it in pre-cold PBS with a ratio of 1:30.
[0272] 3. Diluted matrigel was added to 24-well plates. It was ensured that the quantity used was sufficient to cover the entire growth surface of the plates and keep the plates in 37° C. for 30 minutes to be ready to use.
[0273] 4. Passage 1-2 MEFs were thawed and seeded into the matrigel-coated plates at a preferentially density of 25,000 cells per well of a 24-well plates. Cells were grown in the MEF medium for 4-5 days until confluent.

[0274] Induction of Induced Neurons
[0275] 1. When MEFs were grown confluent, cells were infected with lentiviruses containing expression constructs of rtTA (driven by ubiquitin promoter) and additional lentiviruses overexpressing Asc11-Neurog1/Ezh2-Foxo1/Brn2/Nr4a1/Dmrt3/Jun/Suz12/Nr3c1/Tcf15/Zeb1/Mecom/Hoxc 8/Nr2f1 (driven by Tet-on promoter) in the presence of polybrene (8 mg/ml).
[0276] 2. The next day, media was exchanged with basal medium (50% Neurobasal, 50% Dulbecco modified Eagle medium (DMEM)/Ham's nutrient mixture F12, 0.5% NEAA, 0.5% Sodium Pyruvate, 0.5% GlutaMax, 0.5% N2. 1% B27, 0.1 mM β-mercaptoethanol and 0.05 g/L bovine albumin fraction V; all from Thermo Fisher Scientific) containing doxycycline (2 mg/ml).
[0277] 3. Culture medium was refreshed every 3-4 days during the induction period.

### Maturation of Induced Neurons

[0278] After lentiviruses infection for about 14 days (extensive neurites outgrowth should be observed in this stage), the induced cells were progressed for further maturation: Re-plate and co-culture directly with primary neurons/astrocytes.
[0279] 1. Mouse primary postnatal cortical neurons or astrocytes were isolated and cultured for about 6 days before re-plating the induced cells.
[0280] 2. The induced cells were dissociated by using 0.05% trypsin from the culture plate.
[0281] 3. Cells were centrifuged for 3 min at 1000 rpm at room temperature.
[0282] 4. The supernatant was discarded, fresh differentiation medium (basal media with addition of 200 μM ascorbic acid, 2 μM db-cAMP, 25 ng/ml BDNF, 25 ng/ml NT3, and 50 ng/ml GDNF) was added to gently re-suspend the cells and cells were re-plated to co-culture with pre-existing primary neurons/primary astrocytes.
[0283] 5. Re-plated cells were co-cultured for about 14 days or longer (depending on the maturation process of the induced cells, which can be observed based on the development of the extensive neuritis outgrowth) to become functional mature. Half of the maturation medium was changed every 2-3 days.

### Flow Cytometry, Cell Surface Staining and Cell Sorting

[0284] The antibody CD8-APC was purchased from BD Biosciences. and Anti-PSA-NCAM-APC was from Miltenyi Biotec. Cells were harvested, washed, and adjusted to a concentration of 10⁶ cells/mL in ice cold PBS with 2% FBS. Cells were stained and incubated with diluted primary antibodies at 4° C. for 30 mins in Eppendorf tubes. After staining, cells were washed three times by centrifugation at 400 g for 5 mins and resuspended in 500 μL to 1 mL in ice cold PBS. Cells were kept in dark on ice and analyzed using BD Accuri C6 Cytometer. Cell sorting was performed by using Aria II cell sorter (BD Biosciences).

### Immunocytochemistry

[0285] Experiments were performed on cells seeded on plate (IBIDI) that had been coated with gelatin (0.1%) overnight at 37° C. Cells were washed twice with PBS, fixed in 4% Paraformaldehyde (Wako) for 15 mins at room temperature, permeabilized and blocked with 0.1% Triton X-100, 5% donkey serum in PBS (blocking buffer) for 1 h at room temperature. After three times wash with PBS, cells were incubated with primary antibodies. The following primary antibodies with indicated dilution in blocking buffer were used: Rabbit anti-Oct4 (Santa Cruz, 1:200), Mouse anti-Tuj1 (Covance, 1:1000), Rabbit anti-Map2 (Cell Signaling Technology, 1:200), Rabbit anti-NeuN (Abcam, 1:1000), Rabbit anti-vGluT1 (Synaptic Systems, 1:200), Rabbit anti-GFAP (Dako, 1:500), Rabbit anti-Olig-2 (Millipore, 1:500), Rabbit anti-Tbr1 (Abcam, 1:100), Rabbit anti-Synapsin I (Abcam, 1:200), Rabbit anti-GABA (Sigma, 1:250). Cells were incubated with primary antibodies at 4° C. for overnight, then washed three times with PBS. After staining with corresponding secondary antibodies in blocking buffer for 1 hour at room temperature, cells were washed three times with PBS and stained with DAPI (Vector Labs) for 5 mins. Washed cells were examined using a Nikon Spinning Disk Confocal microscope with TIRF.

### Efficiency Calculation

[0286] The following method was used to calculate the efficiency of neuronal induction. The total number of Map2+ cells with a neuronal morphology, defined as cells having a circular, three-dimensional appearance that extend a thin process at least three times longer than their cell body, were quantified 14 days after infection. The Map2+ and DAPI+ cells were counted from at least 20 randomly selected images at 20× magnification for each condition. The Map2+ cell number was divided by the number of DAPI+ cells to get a percentage of neuron-like cells.

### Electrophysiology

[0287] Lentivirus infections (with an additional sfGFP-expression virus) and transgene induction were performed similarly to as described for the fibroblast-induced neurons production, using basal medium. Patch-clamp electrophysiological recordings were performed on sfGFP positive fibroblast-induced neurons. GFP positive neurons located using a Lambda DG-4 illumination system and Q Imaging Fast 1394 Rolera-Mgi Plus camera controlled by Micro-Manager (Version 1.4) mounted on an Olympus BX51WI fluorescence microscope. Whole-cell responses were recorded using an MultiClamp 7008 (Molecular Devices) amplifier and headstage and low-pass filtered at 10 KHz before digitization using a DigiData 1440 data acquisition system (Molecular Devices). Data was stored on a PC running pClamp software (Version 10.4, Molecular Devices). Patch-pipettes were fabricated from 1.5 mm OD borosilicate capillary glass (Warner Instruments) using a microipette puller (Sutter Instrument, Model P-87) to give tip resistances of 2-4 MO. The series resistance for all recordings was under 10MΩ (Mean: 5.62MΩ, SEM: 0.38, n=12). Capacitance transients and series resistance errors were compensated for (70%) using the amplifier circuitry. The sodium and potassium currents currents were recorded in the voltage-clamp configuration at a holding potential of −80 mV. Spontaneous postsynaptic currents were recorded in the voltage-clamp configuration at a holding potential of −60 mV or −70 mV. Spontaneous action potentials were recorded in neurons held at −60 mV to −80 mV. Action potentials were also evoked by applying depolarizing current.

[0288] All experiments were performed at ambient room temperature (25° C.). The external solution contained (in mM): NaCl (130), HEPES-Na (10), KCl (5), CaCl2(2), Glucose (10). For voltage-gated sodium currents, tetraethylammonium (TEA, 5 mM) was added to the external solution and the internal solution contained (in mM): CsF (120), HEPES (10), EGTA (11), CaCl2 (1), MgCl2 (1), TEA-Cl (10), KOH (11). For voltage-gated potassium currents, tetrodotoxin (TTX, 500 nM) was added to the external solution and the internal solution contained (in mM): KF (120), HEPES (10), EGTA (11), CaCl2) (1), MgCl2 (1), KCl (10), KOH (11). For current clamp recordings of action potentials, 2 mM MgATP was added to the internal solution. All recording solutions had pH values of 7.3-7.4 with osmolality of 290-300 mOsm/kg. Drug applications were administered via local perfusion approximately 200 μm from the recorded cells at a flow rate of 0.2 ml/min and solutions were continually withdrawn from the recording chamber by vacuum aspiration. Drugs were applied until responses reached a steady-state level. Electrophysiological data were analyzed offline using Clampfit 10.4 and data was plotted using Graphpad Prism software.

Bloinformatic Analysis of sgRNA and Gene Hits

[0289] Data processing was conducted with custom scripts. Reads were mapped allowing for a mismatch for the first and last base pair of the spacer, which uniquely identified sgRNA. Each sample was normalized by the total read count. This gave a frequency for each sgRNA:

$${f}_{sgRNA} = \frac{sgRNA counts}{\sum sgRNA counts}$$

The paired Tuj1-hCD8+ and Tuj1-hCD8− were used to compute the enrichment scores. Specifically, frequencies as above were computed as above, and sgRNA with less than 1 count in the Tuj1-hCD8− library were discarded. Enrichment was computed for each sgRNA in each replicate as the log 2 fold-change from the Tuj1-hCD8− sample to the Tuj1-hCD8+ libraries. Enrichment was averaged across replicates and used as E_{sg} in subsequent analysis. For each gene, an enrichment score (ES_{gene}) was computed from the sgRNA enrichment above, as follows. An unnormalized enrichment score (E_{gene.top3}) was computed by averaging E_{sg} for the 3 sgRNA with highest E_{sg}. E_{gene.top3} was normalized by the distribution of nontargeting sgRNA as follows (Gilbert et al., 2014, supra).

[0290] Suppose a gene had N targeting sgRNA. 10000 bootstrap samples of size N were drawn from the nontargeting sgRNA. For each sample of size N, E_{sample.top3} was computed as above. This gave an empirical estimate of the distribution of E_{gene.top3} if the all the sgRNA targeting that gene had been negative control sgRNA. For the final, normalized gene enrichment score (ES_{gene}), the unnormalized enrichment score was divided by the 0.9 quantile of this empirical distribution:

$${ES}_{gene} = \frac{{E}_{gene , top 3}}{{quantile}_{samples} ( {E}_{sample , top 3} , 0.9 )}$$

After ranking genes by ES, the most enriched sgRNA was selected for each gene to subsequently validate.

### Bioinformatic Analysis of Double Screen

[0291] The count matrix was calculated by exact match for both ends, throwing all other reads out. The correlation of counts between replicates of the same condition was high (0.942-0.992), indicating high reproducibility of the double screen. Effect sizes for each gene pair was calculated using MAGeCK MLE (Li et al Genome Biology 2015, 16:281).

[0292] Suppose the null hypothesis that the guide pair of genes i and j have an effect size equal to the maximum of the individual effect size. This will be the case if one gene is the primary driver of neuronal differentiation. Note that the coefficients estimated by MACeCK (βᵢⱼ for genes i and j, in that order) arise from a generalized linear regression and should, if the model posited by MACeCK is correct, be normally distributed.

[0293] Consider the null hypothesis H₀: the effect of guide targeting two genes is less than the maximal effect of guides targeting either gene. The order of the guide is taken into account. A consistent but smaller effect is predicted with the order of the guides reversed. Let signm(x, y) be the function that returns the sign of the larger of the absolute values of the inputs. Under the null hypothesis βᵢⱼ=signm(βᵢ₀, β₀ⱼ) max(|βᵢ₀|, |β₀ⱼ|).

[0294] To this end, note that the standard deviation of βᵢⱼ is bounded above by

\sqrt{8_{β}_{ᵢ₀}²+8_{β}_{₀ⱼ}²}.

Therefore the difference βᵢⱼ−signm(βᵢ₀, β₀ⱼ) max(|βᵢ₀|, |β₀ⱼ|) has standard error bounded above by

$$\sqrt{{s}_{{β}_{ij}}^{2} + \sqrt{{s}_{{β}_{i 0}}^{2} + {s}_{β 0 j}^{2}}}$$

One can construct a test statistic to test H₀ as

$${t}_{i , j} = \frac{1}{2} \frac{{β}_{i , j} - signm ( {β}_{i 0} , {β}_{0 j} ) max ( \vert {β}_{i 0} \vert , \vert {β}_{0 j} \vert )}{\sqrt{{s}_{{β}_{i , j}}^{2} + \sqrt{{s}_{{β}_{i 0}}^{2} + {s}_{{β}_{0 j}}^{2}}}} + \frac{1}{2} \frac{{β}_{j , i} - signm ( {β}_{i 0} , {β}_{0 j} ) max ( \vert {β}_{j 0} , \vert {β}_{0 i} \vert )}{\sqrt{{s}_{{β}_{ji}}^{2} + \sqrt{{s}_{{β}_{j 0}}^{2} + {s}_{{β}_{0 i}}^{2}}}} .$$

[0295] The test statistic constructed does not have an exactly normal distribution due to the high correlation between estimates (since all gene-gene pairs are tested) and therefore an empirical Bayes approach is used to determine significant genes while appropriately controlling the false discovery rate (Efron Large-scale inference: empirical Bayes methods for estimation, testing, and prediction, volume 1. Cambridge University Press. 2012; Efron et al R package 2011).

### Determinants of CRiSPRa Guide Activity

[0296] Since large variation gene effect size was observed (FIG. 27C) and an apparent mixture distribution in the top hits, a Bayesian hierarchical logistic regression mixture model was fit using stan (Carpenter et al 2017 J. of Stat. Software, Volume 76, Issue 1). Specifically, the following model was fit.
[0297] xᵢ=log₂ fold change of guide i;
[0298] gᵢ=gene associated with guide i;
[0299] xᵢ˜ZᵢN(μ_{g}_{ᵢ}, σ²)+(1−Zᵢ)N(0, 1.4²);
[0300] μ_{g}˜ N(3, 1.5²);
[0301] Zᵢ˜ Bernoulli(qᵢ);
[0302] yᵢⱼ=Indicator variable if guide i is in feature j;
[0303] gcᵢ=GC content of guide i;
[0304] dᵢ=distance from the TSS for guide i;

$${q}_{i} = logistic ( {β}_{0} + {\sum }_{j = 1}^{J} {β}_{j} {Y}_{ij} + {β}_{J + 1} {gc}_{i} + {β}_{J + 2} {d}_{i} )$$

[0305] βⱼ˜Laplace(0.2);
[0306] β₀˜N(0, 5).
   In this mixture model, features have a linear effect on the log-odds that the guides belong to the second component. In this way one can separate out gene-specific effects and compare guides targeting the same genes, but pooling the information across all genes. To shrink the feature effects towards zero, a Laplace prior is used. Eight chains were fit and good mixing in all chains and Rhat values near 1 was observed, indicating a good fit of the model.

TABLE 8

| Primers | sgRNA sequence |
|---|---|
| pSLQ1373- | gtatcccttggagaaccaccttgttgnnnnnnn |
| Forward | nnnnnnnnnnnnngttaagagctaagctggaaa |
| primer | cagca (SED ID NO: 386) |
| pSLQ1373- | gatcctagtactcgagaaaaaaagcaccgactc |
| Reverse | ggtgccac |
| primer | (SEQ ID NO: 387) |
| sgAscl1 | gaatggagagtttgcaaggag |
| | (SEQ ID NO: 401) |
| sgNeurog1-1 | ggctgctgggagttgtgcaa |
| | (SEQ ID NO: 405) |
| sgNeurog1-2 | gtgcactactgaatccaaga |
| | (SEQ ID NO: 530) |
| sgNeurog1-3 | gtcaatcagtagcaggcaaa |
| | (SEQ ID NO: 531) |
| sgMyod1 | ggtctccagagtggagtccg |
| | (SEQ ID NO: 406) |
| sgFoxo1-1 | ggttcaggatgagtggaggc |
| | (SEQ ID NO: 425) |
| sgFoxo1-2 | gaagacttcactcatcttgg |
| | (SEQ ID NO: 532) |
| sgFoxo1-3 | gtctcagcgatcggattgct |
| | (SEQ ID NO: 533) |
| sgNr2f1-1 | ggagccaagagaagggctgc |
| | (SEQ ID NO: 426) |
| sgNr2f1-2 | gaagtatatcatagtttcgg |
| | (SEQ ID NO: 534) |
| sgNr2f1-3 | gtttggagtttgagcatcct |
| | (SEQ ID NO: 535) |
| sgBrn2-1 | gaggaaggactgagaagact |
| | (SEQ ID NO: 428) |
| sgBrn2-2 | gtgtaagggatctttgttac |
| | (SEQ ID NO: 536) |
| sgBrn2-3 | gtgtttatgaaagtgtatgg |
| | (SEQ ID NO: 537) |
| sgEzh2-1 | ggttcctttcggcaccttgg |
| | (SEQ ID NO: 429) |
| sgEzh2-2 | gataactgaacagggagtgg |
| | (SEQ ID NO: 538) |
| sgEzh2-3 | gttcggccctctgattggac |
| | (SEQ ID NO: 539) |
| sgNr4a1-1 | gctaacgtgtagtctcgttg |
| | (SEQ ID NO: 431) |
| sgNr4a1-2 | gccacctaggagaagaagtg |
| | (SEQ ID NO: 540) |
| sgNr4a1-3 | ggtttcctttagcttagact |
| | (SEQ ID NO: 541) |
| sgDmrt3-1 | gaggagttgatagttgttcc |
| | (SEQ ID NO: 433) |
| sgDmrt3-2 | gttacaatagactttgaggc |
| | (SEQ ID NO: 542) |
| sgDmrt3-3 | ggcaggtattaatactcaag |
| | (SEQ ID NO: 543) |
| sgJun-1 | gagaataaagtgttgtgccg |
| | (SEQ ID NO: 435) |
| sgJun-2 | gtttacatccaggctttgag |
| | (SEQ ID NO: 544) |
| sgJun-3 | gtttggctgtctagtgacgg |
| | (SEQ ID NO: 545) |
| sgSuz12-1 | gaagctctcaaggcgagaaa |
| | (SEQ ID NO: 436) |
| sgSuz12-2 | gattctgtggaattgggttg |
| | (SEQ ID NO: 546) |
| sgSuz12-3 | gctcagtctcatctccactg |
| | (SEQ ID NO: 547) |
| sgNr3c1-1 | gtcactgctctttaccaaga |
| | (SEQ ID NO: 438) |
| sgNr3c1-2 | gttatggtttcaggctggaa |
| | (SEQ ID NO: 548) |
| sgNr3c2-3 | gactcttctgctcagtttgc |
| | (SEQ ID NO: 549) |
| sgTcf15-1 | gggatatgctcactttggga |
| | (SEQ ID NO: 439) |
| sgTcf15-2 | ggtcgtcgccttatagccgg |
| | (SEQ ID NO: 550) |
| sgTcf15-3 | gaagtgacaggatcagctat |
| | (SEQ ID NO: 551) |
| sgZeb1-1 | gaaggaactaagtttcttct |
| | (SEQ ID NO: 440) |
| sgZeb1-2 | gtgacaggtgatctaggcgc |
| | (SEQ ID NO: 552) |
| sgZeb1-3 | ggaaccttgttgctagggcc |
| | (SEQ ID NO: 553) |
| sgMecom-1 | gattctcaggcagggctcta |
| | (SEQ ID NO: 442) |
| sgMecom-2 | gaccagttcactgaaagatg |
| | (SEQ ID NO: 554) |
| sgMecom-3 | ggcagttctcttgcctagtg |
| | (SEQ ID NO: 555) |
| sgHoxc8-1 | gctctttcctctaacagccc |
| | (SEQ ID NO: 443) |
| sgHoxc8-2 | gaggtgagagttagtaagtc |
| | (SEQ ID NO: 556) |
| sgHoxc8-3 | gtcatcaaagaaagaatggc |
| | (SEQ ID NO: 557) |

TABLE 9

| | | SEQ |
|---|---|---|
| Gene | | ID |
| name | Primer sequence | NO: |
| RiboL7 F | accgcactgagattcggatg | 444 |
| RiboL7 R | gaaccttacgaacctttgggc | 445 |
| Ascl1 F | aagaagatgagcaaggtggagacg | 446 |
| Ascl1 R | gagatggtgggcgacagga | 447 |
| Brn2 F | tttcctcaaatgccctaagc | 448 |
| Brn2 R | ggaggggtcatccttttctc | 449 |
| Tuj1 F | agtcagcatgagggagatcg | 450 |
| Tuj1 R | agtcccctacatagttgccg | 451 |
| Map2 F | agcactgattgggaagcact | 452 |
| Map2 R | caattcaaggaagttgtaaagtagt | 453 |
| | gaagtttg | |
| Foxo1 F | gagtggatggtgaagagcgt | 490 |
| Foxo1 R | tgctgtgaagggacagattg | 491 |
| Nr2f1 F | ccaacaggaactgtcccatc | 492 |
| Nr2f1 R | attcttcctcgctgaaccg | 493 |
| Neurog1 F | cggcttcagaagacttcacc | 494 |
| Neurog1 R | ggcctagtggtatgggatga | 495 |
| Pou3f2 F | tttcctcaaatgccctaagc | 498 |
| Pou3f2 R | ggaggggtcatccttttctc | 499 |
| Ezh2 F | acttctgtgagctcattgcg | 500 |
| Ezh2 R | cgactgcattcagggtcttt | 501 |
| Nr4a1 F | gctagaaggactgcggagc | 504 |
| Nr4a1 R | attgagcttgaatacagggca | 505 |
| Dmrt3 F | agcgcagcttgctaaacc | 508 |
| Dmrt3 R | gcttttgacaacatctgggg | 509 |
| Jun F | gaaaagtagcccccaacctc | 512 |
| Jun R | aatcagacaggggacacagc | 513 |
| Suz12 F | tcgaaattccagaacaagca | 514 |
| Suz12 R | tgtggaagaaaccggtaaatg | 515 |
| Nr3c1 F | ggacaacctgacttccttgg | 518 |
| Nr3c1 R | ctggacggaggagaactcac | 519 |
| Tcf15 F | tctgcaccttctgtctcagc | 520 |
| Tcf15 R | aaccagggatccaggttcat | 521 |
| Zeb1 F | acagagaatggaatgtatgcatgtg | 522 |
| Zeb1 R | agattccacactcgtgaggc | 523 |
| Mecom F | acagcatgagatccaaaggc | 526 |
| Mecom R | ttatcccatctgcatcagca | 527 |
| Hoxc8 F | aaatcctccgccaacactaa | 528 |
| Hoxc8 R | tgtaagtttgtcgaccgctg | 529 |

TABLE 10

| | | Enrichment |
|---|---|---|
| Rank | Gene name | score |
| 1 | Foxo1 | 2.49122811 |
| 2 | Nr2f1 | 2.448600182 |
| 3 | Neurog1 | 2.43849068 |
| 4 | Rb1 | 2.435300527 |
| 5 | Pou3f2 | 2.385360453 |
| 6 | Ezh2 | 2.380072461 |
| 7 | Maz | 2.361103604 |
| 8 | Nr4a1 | 2.351837703 |
| 9 | Arnt | 2.317336958 |
| 10 | Dmrt3 | 2.304207908 |
| 11 | Sin3b | 2.280599668 |
| 12 | Jun | 2.277732884 |
| 13 | Suz12 | 2.276236754 |
| 14 | Klf12 | 2.269476929 |
| 15 | Nr3c1 | 2.249983644 |
| 16 | Tcf15 | 2.229200027 |
| 17 | Zeb1 | 2.221200461 |
| 18 | Nr6a1 | 2.208496165 |
| 19 | Mecom | 2.207944981 |
| 20 | Trim24 | 2.206262504 |
| 21 | Hoxc8 | 2.184103377 |
| 22 | Foxk1 | 2.171388615 |
| 23 | 2410080102Rik | 2.171161939 |
| 24 | Nr4a3 | 2.168779599 |
| 25 | Trp73 | 2.16579857 |
| 26 | Foxs1 | 2.162897697 |
| 27 | Ikzf3 | 2.15938851 |
| 28 | Nkx2-6 | 2.15063949 |
| 29 | Sox11 | 2.140964961 |
| 30 | 1110054M08.Rik | 2.139005342 |
| 31 | Crem | 2.133968618 |
| 32 | Meis3 | 2.131453549 |
| 33 | Bmyc | 2.130409666 |
| 34 | Epas1 | 2.129339686 |
| 35 | Nr2f6 | 2.128397081 |
| 36 | Nacc1 | 2.120269011 |
| 37 | Bsx | 2.120136772 |
| 38 | Foxd3 | 2.114601186 |
| 39 | Myog | 2.107435864 |
| 40 | Smad3 | 2.105254748 |
| 41 | Wt1 | 2.091731056 |
| 42 | Taz | 2.091306567 |
| 43 | Smad7 | 2.071136269 |
| 44 | Stra13 | 2.06971649 |
| 45 | Hoxc4 | 2.062634453 |
| 46 | Pou3f3 | 2.058607569 |
| 47 | Zbtb12 | 2.051837502 |
| 48 | Atf5 | 2.042025795 |
| 49 | Gtf2a2 | 2.041587014 |
| 50 | Pura | 2.040735147 |
| 51 | Snai1 | 2.040229657 |
| 52 | Ncor1 | 2.038396405 |
| 53 | Pcbp2 | 2.036271048 |
| 54 | E2f2 | 2.028758908 |
| 55 | Nfkbib | 2.023153101 |
| 56 | Gli2 | 2.021010016 |
| 57 | Nr0b1 | 2.020715359 |
| 58 | B230110C06Rik | 2.016733057 |
| 59 | T | 2.014396786 |
| 60 | Runx3 | 2.011724145 |
| 61 | Rxra | 2.011600497 |
| 62 | Mafk | 2.009964981 |
| 63 | Foxn1 | 2.006315586 |
| 64 | Smad4 | 1.999197443 |
| 65 | Meis2 | 1.998728368 |
| 66 | Hoxa1 | 1.996287157 |
| 67 | Zic1 | 1.992579239 |
| 68 | Sebox | 1.99248237 |
| 69 | Nfyc | 1.983084664 |
| 70 | Lmx1b | 1.980716237 |
| 71 | Lhx3 | 1.979175342 |
| 72 | Hmx2 | 1.978886945 |
| 73 | Arf6 | 1.977331424 |
| 74 | Nfatc3 | 1.975872129 |
| 75 | Neurod6 | 1.973516686 |
| 76 | Smarca4 | 1.972359038 |
| 77 | Twist1 | 1.971479015 |
| 78 | Gzf1 | 1.963483117 |
| 79 | Hoxc10 | 1.962998475 |
| 80 | Tbx4 | 1.962626034 |
| 81 | Npas2 | 1.962608209 |
| 82 | Ctbp1 | 1.960624385 |
| 83 | Gem2 | 1.960206991 |
| 84 | Is12 | 1.957324105 |
| 85 | Arid5a | 1.956887379 |
| 86 | Lef1 | 1.955552772 |
| 87 | RP24-399L6.2 | 1.953337042 |
| 88 | Smad5 | 1.949029539 |
| 89 | Lbx1 | 1.948838891 |
| 90 | Pax3 | 1.945680745 |
| 91 | Foxj1 | 1.944149198 |
| 92 | Tbx5 | 1.943975816 |
| 93 | Barh11 | 1.943598679 |
| 94 | Hoxd11 | 1.9410811 |
| 95 | Poulf1 | 1.939557398 |
| 96 | Klf3 | 1.938997548 |
| 97 | Pebp1 | 1.937292841 |
| 98 | Evx2 | 1.935442174 |
| 99 | Irx5 | 1.934100096 |
| 100 | Nkx6-3 | 1.928635054 |

TABLE 11

| | |
|---|---|
| pSLQ5004- | tggaaagccagaaacatgnnnnnnnnnnnnnnn |
| Forward | nnnnngttttagagctagaaatagcaagttaaa |
| primer | ataaggctagtcc |
| | (SEQ ID NO: 558) |
| pSLQ5004- | gatcctagtactcgaggtacctctaggc |
| Reverse | (SEQ ID NO: 559) |
| primer | |
| Two | accgtattaccgccagccttttgctcattaat |
| sgRNA | taaggtaccgagg |
| forward | (SEQ ID NO: 560) |
| primer | |
| Two | TGACGGGCACatgcatggtacctctaggctag |
| sgRNA | cgaattcAAAAAAAg |
| reverse | (SEQ ID NO: 561) |
| primer | |
| Scramble | GAACGACTAGTTAGGCGTGTA |
| sgRNA-1 | (SEQ ID NO: 562) |
| Scramble | GTTTAGTAGTTCGTCACACC |
| sgRNA-2 | (SEQ ID NO: 563) |
| Scramble | GCGACATGTCTGTTGGGCGA |
| sgRNA-3 | (SEQ ID NO: 564) |
| Scramble | GTATATAAGCCGGGCGCACG |
| sgRNA-4 | (SEQ ID NO: 565) |
| Scramble | GTCGAACCACGCGTTGATCG |
| sgRNA-5 | (SEQ ID NO: 566) |
| Scramble | GACCCATGACGGTCGACGGA |
| sgRNA-6 | (SEQ ID NO: 567) |
| sgFoxo1-1 | GGTTCAGGATGAGTGGAGGC |
| | (SEQ ID NO: 568) |
| sgFoxo1-2 | GAAGACTTCACTCATCTTGG |
| | (SEQ ID NO: 532) |
| sgNr2f1-1 | GGAGCCAAGAGAAGGGCTGC |
| | (SEQ ID NO: 426) |
| sgNr2f1-2 | GAAGTATATCATAGTTTCGG |
| | (SEQ ID NO: 534) |
| sgNeurog1-1 | GTGCACTACTGAATCCAAGA |
| | (SEQ ID NO: 405) |
| sgNeurog1-2 | GTGCACTACTGAATCCAAGA |
| | (SEQ ID NO: 530) |
| sgRb1-1 | GGCTACATACAGTCTAGGTT |
| | (SEQ ID NO: 427) |
| sgRb1-2 | GAGGAATCGAGAACTTAATT |
| | (SEQ ID NO: 569) |
| sgPou3f2-1 | GAGGAAGGACTGAGAAGACT |
| | (SEQ ID NO: 428) |
| sgPou3f2-2 | GTGTAAGGGATCTTTGTTAC |
| | (SEQ ID NO: 536) |
| sgEzh2-1 | GGTTCCTTTCGGCACCTTGG |
| | (SEQ ID NO: 429) |
| sgEzh2-2 | GATAACTGAACAGGGAGTGG |
| | (SEQ ID NO: 538) |
| sgMaz-1 | GGAAGGCATCTCTGGGAAGC |
| | (SEQ ID NO: 430) |
| sgMaz-2 | GCTCTGCAGGACACCCATGT |
| | (SEQ ID NO: 570) |
| sgNr4a1-1 | GCTAACGTGTAGTCTCGTTG |
| | (SEQ ID NO: 431) |
| sgNr4a1-2 | GCCACCTAGGAGAAGAAGTG |
| | (SEQ ID NO: 540) |
| sgDmrt3-1 | GAGGAGTTGATAGTTGTTCC |
| | (SEQ ID NO; 433) |
| sgDmrt3-2 | GTTACAATAGACTTTGAGGC |
| | (SEQ ID NO: 542) |
| sgSin3b-1 | GTGCAAGAATTCAGTCCACA |
| | (SEQ ID NO: 434) |
| sgSin3b-2 | GTGGTCAAGGTACACACCTA |
| | (SEQ ID NO: 571) |
| sgJun-1 | GAGAATAAAGTGTTGTGCCG |
| | (SEQ ID NO: 435) |
| sgJun-2 | GTTTACATCCAGGCTTTGAG |
| | (SEQ ID NO: 544) |
| sgSuz12-1 | GAAGCTCTCAAGGCGAGAAA |
| | (SEQ ID NO: 436) |
| sgSuz12-2 | GATTCTGTGGAATTGGGTTG |
| | (SEQ ID NO: 546) |
| sgKlf12-1 | GATTTGACCATCTCTTGCCG |
| | (SEQ ID NO: 437) |
| sgKlf12-2 | GAGTCACATTGATCCTGCAA |
| | (SEQ ID NO: 572) |
| sgNr3c1-1 | GTCACTGCTCTTTACCAAGA |
| | (SEQ ID NO: 438) |
| sgNr3c1-2 | GTTATGGTTTCAGGCTGGAA |
| | (SEQ ID NO: 548) |
| sgTcf15-1 | GGGATATGCTCACTTTGGGA |
| | (SEQ ID NO: 439) |
| sgTcf15-2 | GGTCGTCGCCTTATAGCCGG |
| | (SEQ ID NO: 550) |
| sgZeb1-1 | GAAGGAACTAAGTTTCTTCT |
| | (SEQ ID NO: 440) |
| sgZeb1-2 | GTGACAGGTGATCTAGGCGC |
| | (SEQ ID NO: 552) |
| sgNr6a1-1 | GATGACGGTCGGCCGTAGTT |
| | (SEQ ID NO: 441) |
| sgNr6a1-2 | GAATCAGGAAGGCTGTAGCA |
| | (SEQ ID NO: 573) |
| sgMecom-1 | GATTCTCAGGCAGGGCTCTA |
| | (SEQ ID NO: 442) |
| sgMecom-2 | GACCAGTTCACTGAAAGATG |
| | (SEQ ID NO: 554) |
| sgHoxc8-1 | GCTCTTTCCTCTAACAGCCC |
| | (SEQ ID NO: 443) |
| sgHoxc8-2 | GAGGTGAGAGTTAGTAAGTC |
| | (SEQ ID NO: 556) |
| sgOct4-1 | GTCTGGACAGGACAACCCTT |
| | (SEQ ID NO: 574) |
| sgOct4-2 | GAGTGCCTGTCTGCAAGGGA |
| | (SEQ ID NO: 575) |
| sgNanog-1 | GGAAGTTTCAGGTCAAGTGG |
| | (SEQ ID NO: 407) |
| sgNanog-2 | GCTGTAAGGTGACCCAGACT |
| | (SEQ ID NO: 576) |
| sgEsrrb-1 | GGTTAGTGGGCTCCAAGTGT |
| | (SEQ ID NO: 577) |
| sgEsrrb-2 | GGTGAGTGAGTGACACCCTC |
| | (SEQ ID NO: 578) |
| sgKlf2-1 | GAAAGGACCTGTGGACAGTT |
| | (SEQ ID NO: 579) |
| sgKlf2-2 | GCAAGAGGGTAATAGAGAGA |
| | (SEQ ID NO: 580) |

TABLE 12

| | |
|---|---|
| HiSeq | aatgatacggcgaccaccgagatctacacagat |
| forward | cggaagagcacacgtctgaactccagtcacnnn |
| primer | nnngcacaaaaggaaactcaccct |
| | (SEQ ID NO: 581) |
| HSeq | caagcagaagacggcatacgagatcgactcggt |
| reverse | gccactttttc |
| primer | (SEQ ID NO: 582) |
| HiSeq | gtgtgttttgagactataagtatcccttggaga |
| custom | accaccttgttg |
| primer | (SEQ ID NO: 583) |
| (the | |
| first | |
| sgRNA) | |
| MiSeq | aatgatacggcgaccaccgagatctacacagat |
| forward | cggaagagcacacgtctgaactccagtcacnnn |
| primer | nnngcacaaaaggaaactcaccct |
| | (SEQ ID NO: 581) |
| MiSeq | caagcagaagacggcatacgagatggtacctct |
| reverse | aggctagcgaattc |
| primer | (SEQ ID NO: 584) |
| MiSeq | ccactttttcaagttgataacggactagcctta |
| custom | ttttaacttgctatttctagctctaa |
| primer | (SEQ ID NO: 585) |
| (the | |
| second | |
| sgRNA) | |

### Results

### CRISPRa Screening Strategy for Neuronal-Fate-Inducers

[0307] This example describes the identification of novel TFs driving direct neuronal reprogramming from fibroblasts. Using primary fibroblasts as a screening platform is technically challenging. Firstly, as primary cells have limited expansion capacities, it is difficult to modify them to generate a homogenous population, which achieves consistent CRISPR activation activities. Secondly, the neuronal transdifferentiation of fibroblasts is inefficient and not well suited for the enrichment of the desired cell population for the subsequent sgRNA sequencing.

[0308] Thus, mouse ES cells were chosen as a screening platform for the generation of candidate TFs driving neuronal-fate. The ectopic expression of individual key TFs that are critical for neuronal transdifferentiation can also drive neuronal differentiation of mouse ES cells, which supports the use of mouse ES cell differentiation as a discovery tool for neuronal-inducing TFs. Besides, as a model of developmental biology, ES cells have been successfully used to elucidate roles of many master transdifferentiation TFs of other lineages. Finally, mouse ES cells are technically easy to be equipped with CRISRP activation tools and suitable for single sgRNA screens.

[0309] A polypeptide-based SunTag CRISPRa system in mouse ES cells (Tanenbaum et al., 2014, supra) was modified (FIG. 22A). After several rounds of optimization and clonal cell selection based on endogenous gene activation efficiency, a CRISPR-activating mouse ES (CamES) cell line containing lentivirus-transduced CRISPRa elements was generated (FIG. 22B). Next, the CamES cell line was modified with a neuronal reporter. The reporter CamES cell line carrying a biallelic human CD8 (hCD8) gene cassette appended downstream to endogenous Tuj1 via an IRES (internal ribosome entry site) (Tuj1-hCD8 CamES) (FIGS. 22C and 22D). The magnetic-activated cell sorting (MACS)-enriched differentiated hCDS+ cells expressed much higher neuronal markers (Tuj1 and Map2) than hCD8− cells (FIG. 22E), demonstrating that hCD8 expression is positively correlated with differentiated neuronal cells.

### An Unbiased Screen for Key Factors Promoting Neuronal Differentiation

[0310] An sgRNA library targeting all putative TFs (˜800), with an average of 60 sgRNAs per gene was constructed. This sgRNA library also contained 9,296 non-targeting negative control sgRNAs, leading to a total of 55,336 sgRNAs (FIG. 18A). The sgRNA library was transduced into Tuj1-hCD8 CamES cells and 2i+Lif was removed from ES medium to allow neuronal differentiation (FIG. 23A). The Tuj1-hCD8 CamES cells showed highest neuronal marker expression between day 10 and 11 post-transduction (FIG. 23B). MACS were used to sort Tuj1-hCD8+ and Tuj1-hCD8− populations on day 12 (FIG. 23C), and the sgRNA distributions of these two samples were compared, as well as the plasmid library (FIG. 18A). The Tuj1-hCD8+ and Tuj1-hCD8− cell populations exhibited similar sgRNA depletion when compared to plasmid library (Figure S2D). A high correlation of enriched genes between the positive and negative Tuj1-hCD8 populations was found (FIG. 23E). The top hits relative to the plasmid pool in both populations contain many proliferation and self-renewal genes, but few are related to neuronal phenotypes (FIG. 23E). It was contemplated that this is because the predominant factors that determine sgRNA representation in both the Tuj1-hCD8+ and Tuj1-hCD8− populations are in common, such as the growth advantage of cells expressing proliferation and self-renewal genes, less proliferative capacity of desired neuronal cells, and the spontaneous differentiation (FIG. 23F). To control this bias and generate gene-level enrichment scores, sgRNA representation was normalized in Tuj1-hCD8+ samples to Tuj1-hCD8− samples, the enrichment of the top three guides for each gene was examined, and the empirical distribution of the non-targeting guides was used to normalize enrichment scores (FIGS. 18B, 25G, Table 10 and Experimental Procedures). Top-ranked genes (Table 10) were used to transduce individual sgRNAs to CamES cells and look for signs of neuronal differentiation. Among 20 sgRNAs tested, 19 efficiently induced neuronal differentiation, as measured by the expression of neuronal markers, NCAM, Tuj1 and Map2 (FIGS. 18C, 18D, 24A and 24B). A large fraction of validated genes has been previously characterized to act in early neural development. Examples included neuronal fate-inducing TFs such as Ngn1, Brn2, Klf12, Tcf15, and Mecom. These results were consistent with previous studies showing that the forced expression of these genes induce neuronal phenotypes of pluripotent cells. On the other hand, the function of the remaining hits varied considerably. Major categories included neuronal survival (Jun and Maz), cellular senescence (Sin3b and Rb1), homeostasis/metabolism (Foxo1, Nr4a1 and Nr3c1), and epigenetic regulations (Ezh2 and Suz12). In addition, the neuronal-inducing effects of the majority of hit genes were confirmed via the overexpression of their cDNA in unmodified mouse ES cells (FIG. 24C).

[0311] Cells expressing varied neuronal lineage markers resulted from the activation of different endogenous genes were detected (FIGS. 18E and 24D). For example, NeuN and GA BA expressing cells were found for all identified neuronal-fate-inducers. In addition, most hits also induced GFAP and Olig2 positive cells, which indicates the presence of astrocytes and oligodendrocytes. The Glutamatergic neuron marker vGluT1 expressed at varied levels across several hits, such as Zeb1, Brn2, and Nr6a1 (FIGS. 18E and 24D).

[0312] It was next tested if these neuronal factors induce transdifferentiation. As reported, Asc11 alone can induce neuronal transition from mouse fibroblasts. cDNAs of individual genes was transduced into mouse embryonic fibroblasts, cultured cells under transdifferentiation condition, and stained them with neuronal marker Map2. Among the 19 genes tested, only Ngn1 induced neuronal marker expression (FIG. 25). However, compared to Asc11, the transdifferentiation driven by Ngn1 was inefficient (7% vs 1% Map2+ cells). All of the other tested genes failed to induced Map2− cells.

### Neuronal-Fate-Inducing Activity of CRISPRa

[0313] To generate a deep view of how sgRNA design and gene activation level affects neuronal differentiation, other high-ranking sgRNAs of the 19 hit genes were investigated. Quantitative PCR results showed that effective endogenous gene activation (10 to 10,000 fold) was achieved by most of their cognate sgRNAs (FIGS. 18C and 24A). It was observed that, for the majority of hit genes, a higher gene expression level generally induced more efficient neuronal differentiation. Outliers of this trend included Jun, Brn2, Suz12, Tcf12, Zeb1, and Hoxc8. Cognate sgRNAs that induced higher expression levels of these genes generated similar amount of neuronal cells.

[0314] To investigate the determinants of CRISPRa activation in more depth, the targeting locations of top-ranked sgRNAs of the 19 hit genes was investigated. The observed signal followed a mixture distribution (FIG. 26A) (Horlbeck et al 2016 eLife 2016; 5:e19760). To determine what factors contribute to high neuronal signal, a hierarchical logistic regression mixture model was fit to estimate what genomic features can contribute to or prevent efficient activation (FIGS. 26B and 26C). It was found that KDM2B binding sites, H3K27ac peaks, and H3K4me1 peaks contribute to efficient activation (the top feature CXXC1 was primarily associated with a single gene, FIG. 26D). H3K27ac and H3K4me1 are known marks for areas of primed activation (Calo and Wysocka 2013 Mol Cell. 2013 Mar. 7:49(5):825-37), while KDM2B helps to maintain the stem cell state by recruitment of the polycomb repressive complex 1 (He et al. 2013 Nature Cell Biology 15, 373-384). Indeed, when controlling for other factors, being in a KDM2B increases the average observed log 2 fold change by nearly 1 (0.93, p=0.077, FIG. 26E). On the other hand, it was found that hotspots of open chromatin had little effect of guide efficiency (two-sided t-test, p=0.54, FIG. 26E). These indicated that the epigenetic features of sgRNA binding sites are important for CRISPRa activities.

### A Double-sgRNA Screen for Genetic Interactions Driving Neuronal-Fate

[0315] The strategy to use ES cells differentiation as a tool to discover lineage reprogramming factors was justified by the fact that Ngn1, a hit of the primary screen, is able to convert fibroblasts to neurons. However, as most hits failed to achieve transdifferentiation, the difference between the two processes was highlighted. Compared to ES cell differentiation, a direct lineage programming process utilizes profound transcriptional, epigenetic, and metabolic changes of target cells. These complex mechanisms tend to be initiated by synergistic genetic interactions, instead of a single factor. In most cases, direct lineage reprogramming can only be mediated by the ectopic expression of a gene cocktail. Thus, it was hypothesized that novel gene interactions greatly facilitate direct neuronal reprogramming.

[0316] Current gain-of-function techniques, such as cDNA overexpression, are difficult to apply in a pairwise manner, even for a moderate number of genes. In addition, optimal gene expression levels are important for cell fate determinations. Overexpression libraries have limitations owing to dosage and functional issues, and thus may fail to cover genes' optimal expression level. To address these problems, a strategy to determine the gene interactions between the primary hits based on double sgRNA screen was developed. A library of dual-sgRNA-constructs targeting the top neuronal inducers was generated (FIG. 27A). For each hit gene, two sgRNAs were included. These sgRNA-High (H) and sgRNA-Low (L) were validated individually to drive different target gene activation levels (FIGS. 18C and 24A). The double sgRNA construction contains two sgRNAs driven by either human or mouse U6 promoter (FIG. 19B). Thus, two sgRNAs express independently. The library was generated through the ligation of two sgRNA elements, which can be easily scaled up (FIG. 27A). The library also included negative-control sgRNAs, i.e. non-targeting sgRNAs.

[0317] With the same strategy as in single CRISPRa screening, double CRISPRa screening was performed (FIGS. 19A and 27B). Pairwise interactions of sgRNAs were enriched relative to individual sgRNAs, and interaction scores were generated for each sgRNA pair (FIGS. 19D, 27B and 27D). It is noted that the correlations between two independent screening replicates are very high (FIGS. 19C and 27C), which indicates high reproducibility.

[0318] Hierarchical clustering of sgRNAs based on the correlation of their interactions shows that a fraction of sgRNAs tended to form a high number of interactions (FIG. 19D). These interaction-prone sgRNAs included many that drove low levels of neuronal differentiation compared to their counterparts. For example, Ngn1-H and Ezh2-H, which drove high gene activation and mediated efficient neuronal differentiation when applied individually, did not form strong interactions with other sgRNAs (FIG. 19E). On the contrary, their second top counterparts, Ngn1-1, and Ezh2-L, had synergistic effects with almost all other sgRNAs. A hypothesis to explain this is that in the screening system, some top sgRNAs already trigger saturated readout (neuronal differentiation), thus their interactions with other sgRNAs (even those synergistic) failed to be scored higher than themselves.

[0319] On the other hand, for genes whose higher activation lead to similar neuronal differentiation, such as Brn2 and Jun, a targeting sgRNA achieving highest activation tend to form stronger interactions then their counterparts (FIG. 19E). Foxo1-L and Foxo1-H, which mediated quite similar activation activities and differentiation efficiencies, both appeared as interaction-tendency hits (FIG. 19D). All together, these results showed that a library that covers a broad range of induced expression, including a “goldilocks” zone, is optimal for a gain-of-function double screen.

Gene Combinations Identified in Double CRISPRa Screen Convert Fibroblasts into Neurons

[0320] Based on false discovery rate, a list of gene pairs that showed strong synergistic effects was identified. Strong synergies included Ngn1+Ezh2, Ngn1+Foxo1, Tcf15+Zeb1, Tcf15+Foxo1, and Zeb1+Ezh2. To confirm these interactions, constructs expressing corresponding single and double sgRNAs were generated, and their effects in neuronal differentiation of CamES cells was tested. All of the identified sgRNA pairs showed additive effects in neuronal differentiation of mouse ES cells (FIG. 19F).

The synergistic links to Ngn1, the top hit in the single guide screen, that was identified have not been previously reported to drive neuronal transdifferentiation from fibroblasts. The ability of the above identified synergistic gene pairs to drive neuronal transdifferentiation from fibroblasts was investigated.

[0321] One gene pair, Ngn1+Ezh2, induced over 50% Map2+ cells, which is almost 50-fold more than Ngn1 alone (FIGS. 20A and 20B). Another double screening hit, Ngn1+Foxo1, induced nearly 45% neuronal cells. Zeb1+Ezh2, induced strong Map2 expression on neuronal cells (FIG. 20A). On the other hand, neither is able to mediate neuronal transdifferentiation alone. These results highlighted the power of double screen to discover strong synergies to mediate cell fate transitions.

[0322] Here, two new powerful neuronal inducing cocktails were identified: Ngn-1+Ezh2 and Ngn1+Foxo1. It was tested whether the induced cells possess neuron functions. The expression of other mature neuron markers in Ngn1+Ezb2 and Ngn1+Foxo1 induced cells, including Synapsin and NeuN was confirmed (FIGS. 20C and 28A). Furthermore, a large part of induced cells were Tbr1 positive, while a small part was GABA positive (FIGS. 20D and 28B). Moreover, these two combinations also induced neuronal transdifferentiation from tail tip fibroblasts with an extended culture time (FIGS. 20E and 28C).

[0323] It was next assessed whether the induced neurons using Ngn1+Ezh2 and Ngn1+Foxo1 were capable of synaptically integrating into pre-existing neural networks. After 7 days' co-infection of cDNAs and a superfold GFP (sfGFP) reporter, the induced neuron cells were re-plated onto rat neonatal cortical neurons that had been cultured for 7 days in vitro. One week after re-plating, patch-clamp recordings from sfGFP-positive induced neuron cells were performed (FIG. 21A), In voltage-clamp mode, it was observed a fast activating and inactivating inward current followed by a slow activating and inactivating current (FIG. 21B). The action potentials could also be elicited by depolarizing the membrane held at −75 mV in current-clamp mode, which could be inhibited by the application of 100 nM tetrodotoxin (TTX), a selective blocker of voltage-gated sodium (Na+) channels (FIG. 21C). Inward currents could be blocked by the application of 500 nM TTX (FIGS. 21D and 28D), and outward currents could be inhibited by the application of 5 mM tetraethylammonium (TEA), a selective blocker of voltage-gated potassium channels (FIGS. 20E and 28E). Together the voltage-clamp studies show that these induced neurons express functional voltage-gated Na+ and K+ channels, which are critical in the ability of neurons to fire action potentials.

[0324] For all the induced neuron cells analyzed (5/5), action potentials that fired spontaneously were observed (FIG. 20F). Application of 100 nM TTX blocked the spontaneous action potentials, and washout of TTX completely reversed the blockade (FIGS. 21G and 28F). Spontaneous postsynaptic currents were recorded in induced neuron cells held at −60 mV in the voltage-clamp configuration. These currents could be blocked by application of 30 μM 6,7-dinitroquinoxaline-2,3-dione (DNQX), an AMPA and kainate receptor antagonist (FIGS. 20H and 28G). The blockade is reversible upon removal of DNQZ. On the contrary, the presence of 30 μM Bicuculline (BIC), a GABA_{A} receptor antagonist, slightly increased the observed frequency and amplitude of the spontaneous postsynaptic currents (FIGS. 20I and 28H). These experiments demonstrated the induced eurons were mostly glutamatergic excitatory neurons, which fired AMPA/kainate receptor-mediated spontaneous excitatory postsynaptic currents (EPSCs). The emergence of AMPA receptor mediated synaptic transmission is a key step in the development of mature glutamatergic synapses (Wu et al., Maturation of a central glutamatergic synapse. Science. 1996; 274:972), These data indicated that these induced neurons can form mature neurons as they form electrically active networks of cells in vitro. Overall these experiments demonstrate that functional synapses can be formed with induced neurons using Ngn1+Ezh2 or Ngn1+Foxo1.

[0325] FIG. 29 shows three additional powerful neuronal inducing cocktails: Ngn1+Brn2, Brn2+Ezh2, and Mecom+Ezh2; which could drive neuronal transdifferentiation from fibroblasts.

Table 13 Shows Exemplary sgRNAs for Genes Targeted in Examples 1-4.

TABLE 13

| | | SEQ |
|---|---|---|
| gene | guide | ID |
| 6430411K18Rik | GTTGCTGGTTGATGAAGTTG | 586 |
| 6430411K18Rik | GCAGTTCCAAGTACCGGTGC | 587 |
| 6430411K18Rik | GGAAGGCAGCGCCATTCTGG | 588 |
| 6430411K18Rik | GACTCAGAGGACCCAAGAAA | 589 |
| 6430411K18Rik | GGGTCGAGTCCAGGATGAGT | 590 |
| 6430411K18Rik | GGTGGACTTGCTTGCAGGGT | 591 |
| 6430411K18Rik | GGATGATGAAGAAGAGGAGG | 592 |
| 6430411K18Rik | GCACACACTCCGACTCATCC | 593 |
| 6430411K18Rik | GGCTCCTTGGCACAGTACTC | 594 |
| Adipoq | GAACCTGGTTTAATCCAGCT | 595 |
| Adipoq | GGTAGAGAATGGCCAAAGCC | 596 |
| Adipoq | GTCCCATATAGGAACACTGC | 597 |
| Adipoq | GTTTCTAGAGAAATCACGTT | 598 |
| Adipoq | GCTGGGTCTGGTAGACACCC | 599 |
| Adipoq | GAAGCCAGAAGCCAGTAAGA | 600 |
| Adipoq | GTGAAGACCACGAGGCATTG | 601 |
| Adipoq | GTACAGGAAGGTTCCTGGTG | 602 |
| Adipoq | GGAGTCTTAAGGCAGCTGCC | 603 |
| Aebp1 | GATGTCACTTCCCTAGGCAT | 604 |
| Aebp1 | GGCACAGCGGGTTAGAGCAC | 605 |
| Aebp1 | GAGCACTCAAAGGGTCCAAG | 606 |
| Aebp1 | GAGGGATCACACAACAGCAC | 607 |
| Aebp1 | GTCATACTTGGACTGAATTT | 608 |
| Aebp1 | GAGTGGAGAGCTCTCCTCAC | 609 |
| Aebp1 | GGAATTCGAGCAGAGGAGCT | 610 |
| Aebp1 | GACAGAGAGGGTGAGGGTGA | 611 |
| Aebp1 | GGTGATCGCCAGTACCCTCG | 612 |
| Aebp1 | GGATGTCACTTCCCTAGGCA | 613 |
| Aes | GCCTGGACACCCAGGCTTCA | 614 |
| Aes | GAGGAAGCCTTAGAGACTGC | 615 |
| Aes | GATTCTGGTATCCCGGAGGC | 616 |
| Aes | GGCCTCTGATTCTGGTATCC | 617 |
| Aes | GAGTCTGTGGCCTTGGGACT | 618 |
| Aes | GTCTCTGTCTGTCTCAGGTA | 619 |
| Aes | GACACCTGTCCCACAGAGGT | 620 |
| Aes | GGATGGGACACCACTGAGGG | 621 |
| Aes | GACTCAGCAGCTTAAGAGGA | 622 |
| Ahr | GATGAGAAGGAAAGAAGCAC | 623 |
| Ahr | GCCCAAGCAGAAATGAGATC | 624 |
| Ahr | GTTGAGTGCCATGTAAGTTA | 625 |
| Ahr | GCCTTCCTTGTTGAAATAAC | 626 |
| Ahr | GCAGAGATGATAAAGGAAGA | 627 |
| Ahr | GGAAATGACAACAGGAAAGT | 628 |
| Ahr | GATTTAATGGGAGTGATGAG | 629 |
| Ahr | GTCATCACGTGCTGCGAAGA | 630 |
| Ahr | GTCCTTTAATAAGGTCTTCC | 631 |
| Ahr | GAATGTGTATGCCCTGTGAT | 632 |
| Ahrr | GGGAAGCTCCTGCTACCCAG | 633 |
| Ahrr | GTGTGAAATACCTTAAGAGT | 634 |
| Ahrr | GTCAGAACCTTGCATAGATG | 635 |
| Ahrr | GAGGCATCTGGAAGTGCAGA | 636 |
| Ahrr | GGATTTGGTGCACAAACTGG | 637 |
| Ahrr | GTGCCTAGGTGGAAGGTGGG | 638 |
| Ahrr | GGTGGGAGGGACTGGATGAG | 639 |
| Ahrr | GGGTAGCAGGAGCTTCCCAG | 640 |
| Aire | GTACAATCTCACTTTGCTGG | 641 |
| Aire | GCACCACGACACCCAAGGAA | 642 |
| Aire | GGGCCCAGCTTTCGAAAGCT | 643 |
| Aire | GAACAGGGAGCAAGGGACTG | 644 |
| Aire | GCTTGGAGGCCCTGTCTTTC | 645 |
| Aire | GAGATTCCTCACTGGCATGA | 646 |
| Aire | GTTTAGCCTAGAGCCAATCA | 647 |
| Aire | GGTCAGTCACTTCAGAGCCG | 648 |
| Aire | GCTAGAGACTGCCCTGCCTT | 649 |
| Alx1 | GCGGCTGTTAACCGGCTTGC | 650 |
| Alx1 | GGGCACAAGGCCAAGCAGAA | 651 |
| Alx1 | GCATCCGACAGCAAACGAGA | 652 |
| Alx1 | GACAGCAAACGAGAAGGCCA | 653 |
| Alx1 | GGGAGTCAGGGCTCTAAGAT | 654 |
| Alx1 | GTCGAGGCGACTACGATTCT | 655 |
| Alx1 | GCAGAACTGTTAAGTGAAGT | 656 |
| Alx1 | GTTGCTTGCTCCAcCTTCTC | 657 |
| Alx1 | GACAAATGCCAGGAGAGACA | 658 |
| Alx1 | GAAGCTTGAAATAACAGGCT | 659 |
| Alx3 | GAGAAGAGAGGCCTCTACTG | 660 |
| Alx3 | GAATGGAGAGTCTTGTAGGG | 661 |
| Alx3 | GCTGTAAATCAAGGCCAAAC | 662 |
| Alx3 | GACTGCAGGCTAGGCAGAGA | 663 |
| Alx3 | GGTTTCACAGTGGTCTGCCC | 664 |
| Alx3 | GAATGTTGGAGGAGGGATGG | 665 |
| Alx3 | GTCCTTGGTTGAGGGCAGTC | 666 |
| Alx3 | GCCATAACACTGTTTCTGAT | 667 |
| Alx3 | GCTTAAAGATCCCTTAGGTC | 668 |
| Alx4 | GTGAGGAGAATTCCAAAGAA | 669 |
| Alx4 | GTTAGCTTTGAGGTCTCCAT | 670 |
| Alx4 | GTTGAAGCAAAGGTCACCAA | 671 |
| Alx4 | GGATGAGAGGAGTGGGAAGA | 672 |
| Alx4 | GAAACCTGTGTCTGTCTCTC | 673 |
| Alx4 | GCTGGAGCAGATTGGAGGTA | 674 |
| Alx4 | GAGATAGGTGAGATTGGAGG | 675 |
| Alx4 | GATTCGACCCGGAGAAGCCT | 676 |
| Alx4 | GGAATTTCAACAGTGTGGTG | 677 |
| Alx4 | GTCAGCATCTGGATGCCTGA | 678 |
| Alyref | GTTCCCTAATGTCTAATTAC | 679 |
| Alyref | GACCAATCGCCGCTCGCTTC | 680 |
| Alyref | GAACTGCGGCATCTGCAGGA | 681 |
| Alyref | GAAGCGAGCGGCGATTGGTC | 682 |
| Alyref | GCCCAGCAAGCATGACAATA | 683 |
| Alyref | GGCACACGCCTCTAATCCCG | 684 |
| Alyref | GTCTTACCTCTGTAGCATCC | 685 |
| Amer2 | GTGTAGGGAAGGCTCCTTGC | 686 |
| Amer2 | GCGTTCTAAATCAACCTGAG | 687 |
| Amer2 | GACAAAGCAGCTTTCAGTGT | 688 |
| Amer2 | GCATTGTTCTTTGTGGACAT | 689 |
| Amer2 | GAAAGAGGAAGACTGAGCCC | 690 |
| Amer2 | GTGAGAGAGAGCAGTTTCCA | 691 |
| Amer2 | GTATTCTTTCTCCTCTGTGG | 692 |
| Amer2 | GCTAATTGGTATTTGACTGA | 693 |
| Amer2 | GAGAACAACCTGTGTGGGTA | 694 |
| Ap2b1 | GTTTCCCTGTCTCAGGGATA | 695 |
| Ap2b1 | GGGTGCGCGGGAGAACCAAA | 696 |
| Ap2b1 | GATCTCCAAACCTGATGGTC | 697 |
| Ap2b1 | GGCTACCTGGCAGTGAGGAA | 698 |
| Ap2b1 | GGGCTGGAGAGATGGCTCAG | 699 |
| Ap2b1 | GGTTTCCCTGTCTCAGGGAT | 700 |
| Ap2b1 | GGAGAGATGGCTCAGTGGGC | 701 |
| 4p2b1 | GGTCAAGATTTCCTGATTAA | 702 |
| Ap2b1 | GGCTGGAGAGGTGGCTCAGT | 703 |
| Ap2b1 | GATCAATCATGGTTAGCCAG | 704 |
| Ar | GCCTAGTCAGCTCCTGGAGA | 705 |
| Ar | GGCTTTAGAGAACGTAGTGC | 706 |
| Ar | GCACAGAGGTAAACTCCCTT | 707 |
| Ar | GAAACTTCACCGAAGAGGAA | 708 |
| Ar | GGGTCTACAACCTTTCTCTA | 709 |
| Ar | GAGTTAACTGAAACCTCAAG | 710 |
| Ar | GGAGTTAACTGAAACCTCAA | 711 |
| Ar | GCCCACCAGGACAAGCAGAA | 712 |
| Ar | GCGTCCCTTAAGCTTCTGTA | 713 |
| Arf2 | GCTGGTATGTGGGAGGAGCC | 714 |
| Arf2 | GACCAATGGAAATGGCAATA | 715 |
| Arf2 | GGGCTCTGGTAGGAGATTAC | 716 |
| Arf2 | GATTGGTCGTCTGTGGCTTC | 717 |
| Arf2 | GCAATGGTATTGAAGAGGCA | 718 |
| Arf2 | GCGCAAGAGTTCCCAGGAGG | 719 |
| Arf2 | GAGGCTTTGGGAGACTGCTA | 720 |
| Arf2 | GTAGGAGATTACTGGAACTC | 721 |
| Arf2 | GAATCTGGGTATTTCTGACC | 722 |
| Arf6 | GCTTCGTCGGCCCTTAGGAC | 723 |
| Arf6 | GAAGTCAGTGAAAGGGAGCA | 724 |
| Arf6 | GCTAGTTACTGAAGACGTTC | 725 |
| Arf6 | GGAACATGGCACCTGACCAG | 726 |
| Arf6 | GAGTTTAAACTTTCAAAGGC | 727 |
| Arf6 | GTCTGTTTCTTAAGAAATGC | 728 |
| Arf6 | GCAAGGGAAGGTGACAGAGG | 729 |
| Arf6 | GAGAGGCAGGTTGTAAGTGG | 730 |
| Arid3a | GCAGGGATATATTTAGCCAA | 731 |
| Arid3a | GGACCTGAGCACCACCTATG | 732 |
| Arid3a | GTCCTGGGAAAGCTTGGAAA | 733 |
| Arid3a | GAGGTGGTGGGTGTCTCTCC | 734 |
| Arid3a | GTCCCTTGTTAGACTGTTGT | 735 |
| Arid3a | GAACCGTGACGACCGTACCT | 736 |
| Arid3a | GCTCCTAGGTACGGTCGTCA | 737 |
| Arid3a | GGGCTTCAACCCAGCAGTGG | 738 |
| Arid3a | GGAGAAGAATGCTGGTGTGC | 739 |
| Arid3a | GTGACTTTCCGCTCAGAGGT | 740 |
| Arid3b | GCCTAGAGAACATTTATACT | 741 |
| Arid3b | GAGGAGGGACAGGCAGTAAG | 742 |
| Arid3b | GTTACATCTCTAGAGCAAGG | 743 |
| Arid3b | GAGACGCGGGCTAGTGAAGC | 744 |
| Arid3b | GTCCGTTGCTCTCGGTTTGG | 745 |
| Arid3b | GGTAAGGGAAATGGTCACCA | 746 |
| Arid3b | GCTTTCCTCAGCAAGGGAGA | 747 |
| Arid3b | GTTTGCCATGGTAGCACTTA | 748 |
| Arid3b | GAGGACCTGACCAGGGAAGT | 749 |
| Arid3b | GGCAGCGGCTTTCAGCAGAT | 750 |
| Arid5a | GTTCGCAGGTTGCCCGAGAC | 751 |
| Arid5a | GCTAGAGTCTTGGATCTCTT | 752 |
| Arid5a | GAACCGGCCAGGACCACTTC | 753 |
| Arid5a | GAAGTATGGTCACTGTCTCC | 754 |
| Arid5a | GAAATTGTCCCTTGGTGATC | 755 |
| Arid5a | GGATTAGCTGTGGCTTTGAA | 756 |
| Arid5a | GGCTGTGTCCCAGATCACCA | 757 |
| Arid5a | GTAGCTTGCCAAAGACTGGG | 758 |
| Arid5a | GCAGATCTCCATACCTAACC | 759 |
| Arid5a | GGATGGAGAGTGATGGAGGG | 760 |
| Arid5b | GTCTGCTCGGAATATGAATT | 761 |
| Arid5b | GTGATGTGCAGGTCATAATT | 762 |
| Arid5b | GTATATTATTCCTGTAGCGC | 763 |
| Arid5b | GCAAACCGCGCAATGCTCCA | 764 |
| Arid5b | GGCACCAATCTTTCCAGAGT | 765 |
| Arid5b | GATTGCATCAGGTCCTGGCA | 766 |
| Arid5b | GAGGTTTAATACACAATCCA | 767 |
| Arid5b | GAAATATTCAGAGCTGGGTT | 768 |
| Arid5b | GGCCTATCCGATACTGAGAA | 769 |
| Arnt | GTTTGAAACTCCAGGTTAAT | 770 |
| Arnt | GTGTAGTGGAGTCGTCTTTA | 771 |
| Arnt | GAAACAGTAAGTCGCCATAG | 772 |
| Arnt | GAGTTGGCTCTGAAGCTGGT | 773 |
| Arnt | GTGAGCCGACCAACTGGAGT | 774 |
| Arnt | GACTGACCGCGCCCATAGTT | 775 |
| Arnt | GGATTAGGGAAACAGCTGGT | 776 |
| Arnt | GCATTTCACTGACGTCAATT | 777 |
| Arnt | GGCCGGATTAGGGAAACAGC | 778 |
| Arnt | GCGTGTCTTCTGCCCAGGAT | 779 |
| Arntl | GAGAGATTCCTTCACAGAAC | 780 |
| Arntl | GACGAAGTGGCCTTGCTATC | 781 |
| Arntl | GAGGAGGAGGGAGAGCTGAG | 782 |
| Arntl | GGCTTCTCCTTGTGCAAACC | 783 |
| Arntl | GTGCCAATTGGTCCACTCCT | 784 |
| Arntl | GGTGCCAGTAGAAGATAAAC | 785 |
| Arntl | GTGGAGCTGICATTCCCGAT | 786 |
| Arntl | GGACCAATTGGCACGCTCTG | 787 |
| Arntl | GATAAATTCATTGTTCTGGA | 788 |
| Arntl2 | GGGAGCTTCATGTGCAGAGT | 789 |
| Arntl2 | GCAGCCTCACTTCCTGGCTC | 790 |
| Arntl2 | GCTGCTGGTGTCTGAGGAGT | 791 |
| Arntl2 | GACAACACCATTCAGTTGTT | 792 |
| Arntl2 | GGGTGTTCATTTATTTCTGG | 793 |
| Arntl2 | GCAGTCTGGAAGCTCAGGGT | 794 |
| Arntl2 | GGTCTGGAACCGGTTGGAGG | 795 |
| Arntl2 | GGAGGATGCTATTGATGGGT | 796 |
| Arntl2 | GGTGGGTGTTCATTTATTTC | 797 |
| Arntl2 | GGGATCGGTGAGAGAGCAAT | 798 |
| Arx | GAGGTCCATTGGTCCTAGAA | 799 |
| Arx | GGGAATGAGGGTGTCCATTC | 800 |
| Arx | GGCAGAGTGAATATTAAGTT | 801 |
| Arx | GAGTATTCAGAGAGGTGAAA | 802 |
| Arx | GGAGTCCTCAACGCAACTTG | 803 |
| Arx | GACCCAACTTCACTCAGGGT | 804 |
| Arx | GTCCTCAACGCAACTTGAGG | 805 |
| Arx | GAGGGAGGTGGGTAAGAGGT | 806 |
| Arx | GATGGTTGCCTCTGACACGT | 807 |
| Ascl1 | GTTGTTGCAGTGCGTGCGCC | 808 |
| Ascl1 | GTTCCCTAAGAAGCTGAGGC | 809 |
| Ascl1 | GAGGCAGGAGAATAAGTTGG | 810 |
| Ascl1 | GATGTTTGAGGATGACGTCA | 811 |
| Ascl1 | GAGGGAAAGGCTGCTCAGAC | 812 |
| Ascl1 | GGGCACAACTCGCTAAGGGT | 813 |
| Ascl1 | GCCTGAGACAGGGAGGGACA | 814 |
| Ascl1 | GCTAGACGCTATGGGAAAGG | 815 |
| Ascl1 | GAAGCAGAGACTGTGGAATG | 816 |
| Ascl2 | GCAGTGTGTATGGAGGTTGG | 817 |
| Ascl2 | GAGCATGTACTGCCAGTGTG | 818 |
| Ascl2 | GATTGTATTCTCTCAGGTCA | 819 |
| Ascl2 | GGTGACAGTTCCCTAGGGAT | 820 |
| Ascl2 | GGGAGGAAACAGGGCAGCAG | 821 |
| Ascl2 | GGAGCATGTACTGCCAGTGT | 822 |
| Ascl2 | GCTGGCTGTAAGGTGCAGAT | 823 |
| Ascl2 | GCACCTACCTAGTCCTTTGA | 824 |
| Ascl2 | GCCAGAAGGAAGCGTACGCC | 825 |
| Atf1 | GCTGGCCTGTTGTTCAGGCC | 826 |
| Atf1 | GTGGAAGTGCTGGATAAGAA | 827 |
| Atf1 | GAACTATCTGAGAGGATCCC | 828 |
| Atf1 | GTGACCTACAAAGTAAGGTC | 829 |
| Atf1 | GCTTGGAGATAGGCTGGCTG | 830 |
| Atf1 | GGACTTAGCATGTCCTTGTG | 831 |
| Atf1 | GATAGCGACTCCAGAGAGGT | 832 |
| Atf1 | GCCAAGGTCAGAGCATGGAT | 833 |
| Atf2 | GGCAACACCCATATTATCTC | 834 |
| Atf2 | GCTTCTCGGTACACGGAGAG | 835 |
| Atf2 | GACCGTTGTTTCGGTAACCA | 836 |
| Atf2 | GAAGAAAGCGGCAGGGATGC | 837 |
| Atf2 | GAGAGAAGAAAGGTGAGGTC | 838 |
| Atf2 | GGACCGTTGTTTCGGTAACC | 839 |
| Atf2 | GAGGGAATAGACCTGGTGTT | 840 |
| Atf2 | GTCAGCTGCTCATTACTGGT | 841 |
| Atf2 | GCCGACAATATCTAACCCAA | 842 |
| Atf2 | GGGAAGATCGGCTCCAGTTC | 843 |
| Atf3 | GAAGGAAGAGCCCTAAGGTC | 844 |
| Atf3 | GACAATCTCCCGCGTGAAGG | 845 |
| Atf3 | GACCGGAGCTGATCTGCATA | 846 |
| Atf3 | GGGATTACAGCAGCATCGCG | 847 |
| Atf3 | GGGTTGTGGAGGTGTGGAGC | 848 |
| Atf3 | GCGCAGGGATAAGAAAGGGC | 849 |
| Atf3 | GCCTTGGACTTGAGGAACCC | 850 |
| Atf3 | GGGTTTACCTGCCGGCAGGT | 851 |
| Atf3 | GATCTGCATACGGGCTCCCG | 852 |
| Atf3 | GGAGGGCAGAGGCCTGTGAA | 853 |
| Atf4 | GTGAGTCACTTAAACAGAAG | 854 |
| 4tf4 | GGAACTGACCCTATACAAAC | 855 |
| Atf4 | GGACTTGGCCTCAGAGACCA | 856 |
| Atf4 | GTCCCTGTCCCAGGACTGAC | 857 |
| Atf4 | GAGGCCTTGACCAGTACCTG | 858 |
| Atf4 | GGCAGTGAGGGCCTCTATGA | 859 |
| Atf4 | GCAGAGCCAATAGGAACTTG | 860 |
| Atf4 | GGAGGAGCCACCAGAGGTTC | 861 |
| Atf4 | GAGGAGCCACCAGAGGTTCC | 862 |
| Atf4 | GGCATAGGAGGTTAGACCTG | 863 |
| Atf5 | GGGCTTAACCCACGAGGTCT | 864 |
| Atf5 | GGACACACAGAACGATCATA | 865 |
| Atf5 | GACTTAACAAAGCCCATAGC | 866 |
| Atf5 | GGCCTCTAGGGACTTGCTAG | 867 |
| Atf5 | GCTACCTAGGAGCTGTTGCC | 868 |
| Atf5 | GAGGCCTCACAGGACAGGGT | 869 |
| Atf5 | GGAGTTGTGATCATCCCTGG | 870 |
| Atf5 | GAGAGAACAGCCTTGTGTGA | 871 |
| Atf5 | GTCCCTCTTGTCCTTCACCG | 872 |
| Atf5 | GCGCATGCGCAACAGGTTGT | 873 |
| Atoh1 | GCGGAACATTTCAACGGCAC | 874 |
| Atoh1 | GAATTTCCAGAACTGACTAG | 875 |
| Atoh1 | GACAACGTGAGAGCCTGGAA | 876 |
| Atoh1 | GCTTGGAGGGATCCCAGGCC | 877 |
| Atoh1 | GCTCAGATGAGACCCAGGGT | 878 |
| Atoh1 | GCAATCCCATGGACACGCTC | 879 |
| Atoh1 | GCCTGAGATCCCTCCAAGCC | 880 |
| Atoh1 | GAGAGCACTAGGAGCAAGCT | 881 |
| Atoh1 | GTTGAAATGTTCCGCTAGCA | 882 |
| Atox1 | GAGTGGTATCAGTTCCCTTT | 883 |
| Atox1 | GATGGCCAATTCCAGTTCAC | 884 |
| Atox1 | GGACACCAAAGCTGCGCTTC | 885 |
| Atox1 | GTCATTTCTGAAACAGGGCT | 886 |
| Atox1 | GGATTCACATCAGCTCCTTC | 887 |
| Atox1 | GTGGCTCTTGCATCAGCCTC | 888 |
| Atox1 | GCTAGGTTCCTCCCTTGGGC | 889 |
| Atox1 | GTTCTGGCTGGGAGGCTTCT | 890 |
| Atox1 | GTGCAGATTAAAGTCATGGC | 891 |
| Bach1 | GCGAGCTCCGTGTAACGTTG | 892 |
| Bach1 | GTAGCCCTGGCAGGACTTGT | 893 |
| Bach1 | GCCTTCAGCAGGTGAGGAAG | 894 |
| Bach1 | GCACTGTCTGTGTGTGTTTA | 895 |
| Bach1 | GCTTATTCCATGCTATTCTA | 896 |
| Bach1 | GCACCAGGTCACCACTTACA | 897 |
| Bach1 | GAAGCTAGTGATCATTCAGA | 898 |
| Bach1 | GCTCTTACTAGCGGAGGGCG | 899 |
| Bach1 | GTGGTTCTGACAGACATTCG | 900 |
| Bach1 | GTGGTCTACCAGGCTGTGAG | 901 |
| Bach2 | GAGGCAAAGACCGGAGCTCT | 902 |
| Bach2 | GGTTGTGTTAGTTGCTGTGC | 903 |
| Bach2 | GACTGAAATTGACCTCTACT | 904 |
| Bach2 | GAAGGCCAGTGTGGCACGTG | 905 |
| Bach2 | GTTTGTCCTTTGTTGCAATC | 906 |
| Bach2 | GGCTGGAGCAACACTTTGGA | 907 |
| Bach2 | GAGAAACACTAGAACCACTG | 908 |
| Bach2 | GCATGTGGCATTGCTAGCTT | 909 |
| Bach2 | GGGCCTGATTCAGCTTTCCA | 910 |
| Barhl1 | GTTGCAGCTACTTGGAGACC | 911 |
| Barhl1 | GGATCAGCCACTGCTAGTGC | 912 |
| Barhl1 | GGAGCTGCTAGGAACCCTTG | 913 |
| Barhl1 | GCCCTAGAGAGGCCACTGAC | 914 |
| Barhl1 | GGGTCCTAAGAGGTTGGGTT | 915 |
| Barhl1 | GGAAATTAGGAGGAAGAAAG | 916 |
| Barhl1 | GTTGAGCCACACACTCACCC | 917 |
| Barhl1 | GCACAGACCTAACTATTTAC | 918 |
| Barhl1 | GTTGCGCATCTGGGCAGCAG | 919 |
| Barhl1 | GAGAATTGTGGTGTTCTACA | 920 |
| Barhl2 | GAGCAGACATTTATTTATCA | 921 |
| Barhl2 | GTAGTCTTTGGCGCCAGAAC | 922 |
| Barhl2 | GCTGACGGCACAGCTTGTGC | 923 |
| Barhl2 | GAGTAGAGCTCAGACGTTGC | 924 |
| Barhl2 | GAGTGCTATCTAGATGGTCT | 925 |
| Barhl2 | GGATGACAAGCCAACGCGCG | 926 |
| Barhl2 | GACCAAGGCCTAACCTGGGA | 927 |
| Barhl2 | GTCGCGTTCCAGGTCCCAAA | 928 |
| Barhl2 | GCGCGTTGGCTTGTCATCCG | 929 |
| Barhl2 | GGGATGGAAGCATTGGAGGG | 930 |
| Barx1 | GGCGCACCTGTGGAATGGAG | 931 |
| Barx1 | GAAACTGGCCGCTCTGGGAG | 932 |
| Barx1 | GCTCTGTGGAGAGCATTCGT | 933 |
| Barx1 | GAGCTGTAGCAATGAGCTTT | 934 |
| Barx1 | GGAATGCCTGAACCAGTCCT | 935 |
| Barx1 | GCCTGATGTTGAGCCCTCCA | 936 |
| Barx1 | GCGCATAGTGTTCAAATACA | 937 |
| Barx1 | GCACCTGTGGAATGGAGTGG | 938 |
| Barx1 | GGGATCCAGTGCAATACACC | 939 |
| Barx1 | GTGAGTAGAAGCGGCTTTCT | 940 |
| Barx2 | GGCGCTAAGGGAGGACAGAG | 941 |
| Barx2 | GAAAGTTTGTAAGGCACCGA | 942 |
| Barx2 | GCTGTGGGCTGGGTTGAGAG | 943 |
| Barx2 | GGCAATCAAGTTTGCAACCT | 944 |
| Barx2 | GCTTGCGCACACCACTTCAG | 945 |
| Barx2 | GCATTTGTGAACCCGTACCC | 946 |
| Barx2 | GCGAGTACCAACGAGGGAAA | 947 |
| Barx2 | GCCATGAACACATGATTGTA | 948 |
| Barx2 | GTATAACACACTTCTGGTAT | 949 |
| Barx2 | GCTCCGAGCATGGTTAGCCG | 950 |
| Bbx | GTGAAAGACACATGGCAAAG | 951 |
| Bbx | GTCAGTGGGACCTGACCGTG | 952 |
| Bbx | GTCCAATTAGTGTTAATGTC | 953 |
| Bbx | GATCCCTTCTGCACTGAGTT | 954 |
| Bbx | GCCCATATCCACGTGGACTA | 955 |
| Bbx | GAGGCAGGGACAAACCAGGT | 956 |
| Bbx | GACTGGGACGTGAGAGCACA | 957 |
| Bbx | GAAAGGTAACAAATCAAACA | 958 |
| Bbx | GCTACTTAGTCTTT3AACTA | 959 |
| Bbx | GCTCAACACCTGGGAACTAA | 960 |
| Bcl6 | GTGGGAAGAGAGAGAGAGAA | 961 |
| Bcl6 | GTGGCTCGTTAAATCACAGA | 962 |
| Bcl6 | GCTCTGTTGATTCTTAGAAC | 963 |
| Bcl6 | GTCCTTTCTTCTCTCTTTAT | 964 |
| Bcl6 | GGTGGGAAGAGAGAGAGAGA | 965 |
| Bcl6 | GGTAGAGCCAGCCAGAGTGG | 966 |
| Bcl6b | GGCCTCTCCCTTCTGTTCTT | 967 |
| Bcl6b | GGTCGTATCGTGGATGGCTT | 968 |
| Bcl6b | GTCTGCATCCTTCCACGAGA | 969 |
| Bcl6b | GCGGAGGGTGGTAATATGGG | 970 |
| Bcl6b | GCTGAGAGCTTGATTGATGG | 971 |
| Bcl6b | GAGGTTAGTGGTGCGGAGGG | 972 |
| Bcl6b | GAAGCTAGGAGAGGATCTGA | 973 |
| Bcl6b | GCCGAAGAGAGCAGGGACCT | 974 |
| Bcl6b | GAGAAGGAGGAGTGATTGAC | 975 |
| Bcl6b | GCATGAGTACGCAACTAATT | 976 |
| Bhlhe41 | GCATTTAGCAGGAAGAAACG | 977 |
| Bhlhe41 | GGTTCCTCGAGTAGGACGAC | 978 |
| Bhlhe41 | GATAAGCCACGCCGAGAGTG | 979 |
| Bhlhe41 | GGCTTCCTCCAGTTCTTAAC | 980 |
| Bhlhe41 | GAGCAATTTACACCTTGAGC | 981 |
| Bhlhe41 | GGCGAGCCCACGTTTACTAC | 982 |
| Bhlhe41 | GAGACTCAAGTTTAAGGCAG | 983 |
| Bhlhe41 | GGAGGTGCCAGTAGTAAACG | 984 |
| Bhlhe41 | GGCTTATCGCACGAGGGAGA | 985 |
| Bhlhe41 | GGAGACAGGATTAAGGAGGG | 986 |
| Bmp7 | GGCACTTCCTCCTAAAGTCT | 987 |
| Bmp7 | GGCCAGGGACTCAGTACTGG | 988 |
| Bmp7 | GTGCTTCTGTGGTGGGAAGA | 989 |
| Bmp7 | GCGTGTTTGTTCTGTCACTT | 990 |
| Bmp7 | GACTGGAGCAAATGGAGTGT | 991 |
| Bmp7 | GTCCAGCACCCAAGGGATCC | 992 |
| Bmp7 | GTCTCTCTGTGGAGACTCAG | 993 |
| Bmp7 | GTTAGACAGTGAGGTACCAA | 994 |
| Bmp7 | GCACCGAAGAAGGGAGAGAT | 995 |
| Bmp7 | GGCAAGCATGGCAACCTCCA | 996 |
| Bmyc | GAACTGGGTCCAGATAGGAA | 997 |
| Bmyc | GGCATGATAGCCCAGGAGCT | 998 |
| Bmyc | GTTGGTCTGCTCACATGTTA | 999 |
| Bmyc | GTGCAAAGCCCAGTGGAGGC | 1000 |
| Bmyc | GAGCAGAATTCCAGCAGGAC | 1001 |
| Bmyc | GGTCCTGCCTCCAAGTGTCC | 1002 |
| Bmyc | GGACACTTGGAGGCAGGACC | 1003 |
| Bmyc | GATACTTTGAGCTTGGCGTC | 1004 |
| Bmyc | GAGCCTGGTGAAGGGACTGT | 1005 |
| Bnc1 | GGGTGCAGAAATATGTGGAG | 1006 |
| Bnc1 | GAAGCAGGTGCAACAAATTG | 1007 |
| Bnc1 | GCCTTCTGCCIGGTCCACAC | 1008 |
| Bnc1 | GGGACTGGCTGTTTGGGTCT | 1009 |
| Bnc1 | GGCTGTTTGGGTCTTGGGTC | 1010 |
| Bnc1 | GACCCAGAACAGGCACCTGG | 1011 |
| Bnc1 | GAGAGCAATGTGAAGGGCCA | 1012 |
| Bnc1 | GGTGACTTCGCTCTCAGAGT | 1013 |
| Bnc1 | GAAAGGACTCAGAGACAAGA | 1014 |
| Bnc1 | GTGCCTGTTCTGGGTCTACC | 1015 |
| Bptf | GCGAGAGGGAAGAAACAAGA | 1016 |
| Bptf | GGTTTGGGAGACACGCATTG | 1017 |
| Bptf | GAGGTGTGGAAGTTCGTAGC | 1018 |
| Bptf | GGCTCAACACAGGGTCCTCG | 1019 |
| Bptf | GTTGTTCCAGGAATGCACGC | 1020 |
| Bptf | GTCAGGTAGACATTATTTCC | 1021 |
| Bptf | GAGTGGTAAACTTACCCACA | 1022 |
| Bptf | GAACTTAAGGATAGGAAGGA | 1023 |
| Bptf | GCCTTTGGGAGCTCTCTATT | 1024 |
| Bsx | GAAGAGACTGAATGTCACTT | 1025 |
| Bsx | GTGGCTGGGAACCIAGACAT | 1026 |
| Bsx | GTTATGGGTAAGGGTGGCGG | 1027 |
| Bsx | GCGATTCCTCGAGCAATCTG | 1028 |
| Bsx | GTGTTCCTCTTTGTCTGGAA | 1029 |
| Bsx | GCCTGGCAGCAGCCAGTGAA | 1030 |
| Bsx | GTGAGGATCTACACAGTGGC | 1031 |
| Bsx | GAGGCAAGAAGACAAGCGCC | 1032 |
| Bsx | GGGAGCCCGGCGAACCAATA | 1033 |
| Carf | GGCCTACAAGATATCTCAGT | 1034 |
| Carf | GTCACTCAGAATAAAGAAGC | 1035 |
| Carf | GGTACTTGATGTGTGCGGGC | 1036 |
| Carf | GAACGAGTCGGAAGGGAACT | 1037 |
| Carf | GTAGTTGTAGATGAGGAATC | 1038 |
| Carf | GGAAAGGAGAACGAGTCGGA | 1039 |
| Carf | GCATAGTCCCATTTGTACCA | 1040 |
| Carf | GAGCTGAAGTGCTTGTGTCC | 1041 |
| Carf | GTCAACTGGACAATTAATGA | 1042 |
| Cav1 | GGTGCAAGGAAGAAGCACGG | 1043 |
| Cav1 | GGCACCTTGGAGGAATGGGC | 1044 |
| Cav1 | GCTCTGGAATCATAAAGATT | 1045 |
| Cav1 | GCCTCTTGGCTGTTCGCCAG | 1046 |
| Cav1 | GGCTTTCCCTCTGCTGGTTT | 1047 |
| Cav1 | GAGAAGGAATACAGAGGAGG | 1048 |
| Cav1 | GCCTCCTTTGTCTTATTGTA | 1049 |
| Cav1 | GGCGGTGGTACTTGTGAGGG | 1050 |
| Cav1 | GAGAGTGATCTAAGTAAGGG | 1051 |
| Cbfb | GGGAAAGGAGAAACAGAAGT | 1052 |
| Cbfb | GTAAGCATCTAACCAAATCA | 1053 |
| Cbfb | GCGCTAATTGTTTCTCATAT | 1054 |
| Cbfb | GCTGATACAGACCACTCAGT | 1055 |
| Cbfb | GGCTGATGCTAGCGTTTGCC | 1056 |
| Cbfb | GAACAGATTAGGTGCATGAA | 1057 |
| Cbfb | GAGGACTTTGCATACAGGGA | 1058 |
| Cbfb | GTGGACTGTGCACTGAAAGG | 1059 |
| Cbfb | GAAGTGCTGAGGAAGGAGCA | 1060 |
| Ccnt1 | GAGCTTCGTTTGAGTGTTTG | 1061 |
| Ccnt1 | GGATCTCCGGTAGAACGGAA | 1062 |
| Ccnt1 | GAGATGCTGATACAAGACTA | 1063 |
| Ccnt1 | GAACTACTGACCTGACGCGC | 1064 |
| Ccnt1 | GGTGGAGGAGAAAGGATCTC | 1065 |
| Ccnt1 | GACGTGACGAACTTCCTCCA | 1066 |
| Ccnt1 | GGTTCCTGGGTTCTTAGCTC | 1067 |
| Ccnt1 | GTAGACATTCTAAAGAGAAG | 1068 |
| Ccnt1 | GTGTGGCAAGGCACTGAGCA | 1069 |
| Ccnt1 | GTGTAGACATTCTAAAGAGA | 1070 |
| Cdkn1c | GGGAGTCGAGAAGGTGACTC | 1071 |
| Cdkn1c | GCTAACCAGGTCCAAGGTCG | 1072 |
| Cdkn1c | GCACACTGCTTCCAGAAGCA | 1073 |
| Cdkn1c | GAGGAACAGAATGAGGGCTG | 1074 |
| Cdkn1c | GTCTGTTGCGAGGAGGAAAC | 1075 |
| Cdkn1c | GAAGTACCCATTCTGCCCAA | 1076 |
| Cdkn1c | GGTCCAAGGTCGAGGTCCCA | 1077 |
| Cdkn1c | GGGCTCCTTTGTCTGCAGGC | 1078 |
| Cdkn1c | GGAGTGTGGTCCTGTGACCA | 1079 |
| Cdkn1c | GAGTTGGTTCGAAGAGCTGG | 1080 |
| Cdx1 | GATCCTCGTTGGTAATGGAA | 1081 |
| Cdx1 | GAGTTCTGCCCTTTCCTCTC | 1082 |
| Cdx1 | GCCAAGCTAGAGAATTCTTT | 1083 |
| Cdx1 | GGCGGTATGTCCACCCTTTG | 1084 |
| Cdx1 | GGTAGTGGCTTAGAGATGGA | 1085 |
| Cdx1 | GTAAGGTAGCGGGCGTCTCT | 1086 |
| Cdx1 | GGTTCCGTCTGTAAGGTAGC | 1087 |
| Cdx1 | GAAGGCCTAGCATGGAGGGC | 1088 |
| Cdx1 | GCCTGCCTGCCTGTCTTCAA | 1089 |
| Cdx1 | GACGCCCGCTACCTTACAGA | 1090 |
| Cdx2 | GAAATGATACTGACAGGAAC | 1091 |
| Cdx2 | GGGATGTGAAGGGTGGAAGG | 1092 |
| Cdx2 | GCAGTAATGAATAGCGACAA | 1093 |
| Cdx2 | GCATTCGGAAGACACAGGCT | 1094 |
| Cdx2 | GAGAGCATTGTCAGCATCCT | 1095 |
| Cdx2 | GAAGCTCGTAGCTAGCAAGA | 1096 |
| Cdx2 | GTCTTTGAACCTGTGATTGG | 1097 |
| Cdx2 | GGTGAGTACAGTAGCTCTGT | 1098 |
| Cdx2 | GAGCTTCCTCCTTCCAACCT | 1099 |
| Cdx2 | GCACTTTAACCTCCAATCAC | 1100 |
| Cdx4 | GTACATAGATGAGCAAGAGA | 1101 |
| Cdx4 | GGTCAATTACTCTTGAGTGT | 1102 |
| Cdx4 | GAAATGAGCAAGTGTCATTG | 1103 |
| Cdx4 | GAGCAGACTGCTCCTGCTCC | 1104 |
| Cdx4 | GAGTATGCGGCTCAGAGCAA | 1105 |
| Cdx4 | GAAAGGCAGGCCTCAGTGAA | 1106 |
| Cdx4 | GGTAGCCAGGTCACAACACA | 1107 |
| Cdx4 | GTCCCTGAAGTGGCGCTGAT | 1108 |
| Cdx4 | GCTGATGGGCTAGGAGCTAG | 1109 |
| Cdx4 | GTCATTGTGGTGGACCTGCA | 1110 |
| Cebpa | GAGAGACGTGGGTGCTCACC | 1111 |
| Cebpa | GCAGGTTTGTTTACCTGGGA | 1112 |
| Cebpa | GCTGGGTAGCAACGTCTGCC | 1113 |
| Cebpa | GTGAGCAGAGGATCGCTCTC | 1114 |
| Cebpa | GGTCACGGAACACGGACAAA | 1115 |
| Cebpa | GATCGAAGGCGCCAGTAGGA | 1116 |
| Cebpa | GTGACTTAGAGGCTTAAAGG | 1117 |
| Cebpa | GGAAAGTCACAGGAGAAGGC | 1118 |
| Cebpa | GTGCTAGTGGAGAGAGATCG | 1119 |
| Cebpa | GACTTRCCAAGGCGGTGAGT | 1120 |
| Cebpb | GGTCCCTGAACTGGCCTCTC | 1121 |
| Cebpb | GGAGAAAGTCTCCCAAGCCT | 1122 |
| Cebpb | GAAATGTTGGCAGGAAGCTA | 1123 |
| Cebpb | GCCTATTGAGCAAAGAACCT | 1124 |
| Cebpb | GTGGCCAGACCAACCAAGAA | 1125 |
| Cebpb | GCTCAGAGACAGCAGAGGGC | 1126 |
| Cebpb | GTCATTTCTCCAGCTCTTGG | 1127 |
| Cebpb | GGCTGCAAAGGTCTCTGGTG | 1128 |
| Cebpb | GGGTTCTGCCACACTGTGTC | 1129 |
| Cebpb | GATCTGTTTCCCAAGAGTTG | 1130 |
| Cebpd | GTTGTGTTTACAAGACAGCG | 1131 |
| Cebpd | GAACCACGGTTCACTAGTTC | 1132 |
| Cebpd | GATGCTATGCTACCACCAGG | 1133 |
| Cebpd | GAAACGCACCGCGGTTAGGG | 1134 |
| Cebpd | GCTCCTACCTTCAGTTCCTG | 1135 |
| Cebpd | GCCTTCAGACATAGCAAAGG | 1136 |
| Cebpd | GACATAGCAAAGGCGGAACA | 1137 |
| Cebpd | GTCCTGCTTTGCGCGTGTCG | 1138 |
| Cebpd | GACGCCTTCAGACATAGCAA | 1139 |
| Cebpd | GTTGCTGAACCTAACCTCGA | 1140 |
| Cebpe | GTTTAGACCAAGTTGGCACT | 1141 |
| Cebpe | GCAGCTACCAGCTTCTcCTT | 1142 |
| Cebpe | GGTAGGTGGAGTTCAGGACT | 1143 |
| Cebpe | GAAGCCTTCCCTAGCCCAGC | 1144 |
| Cebpe | GGAAGCCTTCCCTAGCCCAG | 1145 |
| Cebpe | GTAGATAGGGAAGCAGGAGA | 1146 |
| Cebpe | GGGCTGCCAGGACATAGCTG | 1147 |
| Cebpe | GATCCTTTCTGTTGGTTCTG | 1148 |
| Cebpe | GAAACTGGTCCCGCTGGGCT | 1149 |
| Cebpe | GGGTTAGTAGAAGATCAAGA | 1150 |
| Cebpg | GAGCTATTCATATGAAGTAT | 1151 |
| Cebpg | GAACTGTTCCCGGGAGACCC | 1152 |
| Cebpg | GACTCCTGGGCATTGACTGC | 1153 |
| Cebpg | GCCACCACCGACAGCCTAAG | 1154 |
| Cebpg | GGATTCCTCGAAGTCTTATG | 1155 |
| Cebpg | GCTTCTATTGGTCACGGCGG | 1156 |
| Cebpg | GCATGATGCAGATCTGTGAA | 1157 |
| Cebpg | GATAGAACTTTGCTTGCCAT | 1158 |
| Cebpg | GGAGGACCACAGTGTGACTG | 1159 |
| Cebpg | GAGGGTGTTCCTAGAATAGA | 1160 |
| Cebpz | GTGACGCACTTCCTATTGCG | 1161 |
| Cebpz | GTATGTCCAATGACCTATAT | 1162 |
| Cebpz | GCTCCTCTGTGTACACACAC | 1163 |
| Cebpz | GATTGCTTATTTGTGCCATG | 1164 |
| Cebpz | GGTGGAACTTGGCCCTGGTC | 1165 |
| Cebpz | GCCTTCCCTGTATTTGGAGA | 1166 |
| Cebpz | GGCGGTGGCTCAACACCTGA | 1167 |
| Cebpz | GTGTACACAGAGGAGCCCGA | 1168 |
| Cebpz | GCCGCGCCATACGGTTTCCA | 1169 |
| Cebpz | GAAGCTCACTCTCAGGGTGA | 1170 |
| Clock | GAACCTAAGCGAGCAGCAGA | 1171 |
| Clock | GCAGAAACTGTGCCTTTCGA | 1172 |
| Clock | GGGTCGTCCAGGTCCATCTC | 1173 |
| Clock | GGACAGAGTGGAGAATGGGT | 1174 |
| Clock | GCACATGGTGTTTAAGGCCA | 1175 |
| C1ock | GTGGTCCAGGCAGGACACTG | 1176 |
| Clock | GACAATGAAACCATTAAAGG | 1177 |
| Clock | GAGGACAATGAAACCATTAA | 1178 |
| Cnot3 | GACTTAAGAAGGTGAAACCT | 1179 |
| Cnot3 | GTACGTCGCTCTGCGCCGTT | 1180 |
| Cnot3 | GAACTGCTTCTAGCTCTATC | 1181 |
| Cnot3 | GAAGCTTATCTAGTGGGAGA | 1182 |
| Cnot3 | GATCAGATAACAGCCTAGAC | 1183 |
| Cnot3 | GAATTTCCATGGATCATTTC | 1184 |
| Cnot3 | GCGTGGGACTGACGTTTCTC | 1185 |
| Cnot3 | GTTTGCAACCTAGTCAGCAA | 1186 |
| Cnot3 | GCATAGCGTGTGAGTGTTAA | 1187 |
| Cnot3 | GACTGAGAAACACAAGGCGT | 1188 |
| Creb1 | GAAACATGCTACAAGAAGAA | 1189 |
| Creb1 | GCACGATCCGAGCCTCACTG | 1190 |
| Creb1 | GCTAAGAACCGTGGGAGGAA | 1191 |
| Creb1 | GCTATGGCACAGGTGGCATG | 1192 |
| Creb1 | GAGCAGTTGCGGTAGCTTTG | 1193 |
| Creb1 | GGCTCAGATGACTCCTGCAC | 1194 |
| Creb1 | GGAACTTTGACGCGCCGCGA | 1195 |
| Creb1 | GGTTTGTGTGTAGCCAGATT | 1196 |
| Creb3l2 | GCCGGAGCTGGTTCTTTGCT | 1197 |
| Creb3l2 | GAGCGTCGCAATGGACCAAT | 1198 |
| Creb3l2 | GTCACTGGCCTGGAAGGAGG | 1199 |
| Creb3l2 | GAAACATAGATCAATGAGCT | 1200 |
| Creb3l2 | GGGCAGAGCTCAAGAGCCCA | 1201 |
| Creb3l2 | GGTCAGGTCAATATAGAAGG | 1202 |
| Creb3l2 | GAGGAGACTGAAGAAATCCA | 1203 |
| Creb312 | GAGGGAACCCAGGTCACAGA | 1204 |
| Creb3l2 | GAAGAGGCTAGTGTGGTCCA | 1205 |
| Creb3l2 | GGGAGGGACATGGATGAGAA | 1206 |
| Crebbp | GTGTGGCACACCCAAGTGAG | 1207 |
| Crebbp | GGAAGTCCCTCTAACACTTT | 1208 |
| Crebbp | GTTCAGAGGCCTCCGAATTG | 1209 |
| Crebbp | GACCAGCATCACTGCATCTG | 1210 |
| Crebbp | GCCATTACTAGCATAGGGCG | 1211 |
| Crebbp | GTTGTCTACTAGTCTGTCCC | 1212 |
| Crebbp | GTGAATGTAGGATGCTGGTG | 1213 |
| Crebbp | GGGCCCATCTCAGATCCAGG | 1214 |
| Crebbp | GTTTACCAACAGTATCCTTT | 1215 |
| Crem | GTTAGCTACAGTACTACAGA | 1216 |
| Crem | GAAAGAAAGATTGGAATTCA | 1217 |
| Crem | GGACCAGACTCTCTTCAGGA | 1218 |
| Crem | GCAAGTGAAGATTAAAGATG | 1219 |
| Crem | GCAAATAGAACTTAGCATTG | 1220 |
| Crem | GAACAACCATTTGTGAGTTT | 1221 |
| Crem | GAAGGTTACAAATAGGCCAG | 1222 |
| Crem | GCAGCCTCTTGGCTACTAAC | 1223 |
| Crem | GACCTCAATCCCAAAGTGTG | 1224 |
| Crx | GGTGTCACTGGGAAGCATGG | 1225 |
| Crx | GTTCTGCTTCTCTAAACACC | 1226 |
| Crx | GGGTGGTGGGATTAAGCAGA | 1227 |
| Crx | GAAGGCTAAACTATGCAGAC | 1228 |
| Crx | GAAACAATCCTTCAGGCCAG | 1229 |
| Crx | GTCACTGGGAAGCATGGAGG | 1230 |
| Crx | GATCTGGAAGGGTAATCCCA | 1231 |
| Crx | GCTCTCTGAAGCTTGACAGG | 1232 |
| Crx | GGCCCTAATCTCTCCTAGCA | 1233 |
| Crx | GCCCTAATCTCTCCTAGCAG | 1234 |
| Crygf | GGCAACAGAGGTGAATTGCC | 1235 |
| Crygf | GTAGAGAGAAGAAACCTCCT | 1236 |
| Crygf | GAAAGAATGGAAGGCAGGGA | 1237 |
| Crygf | GGATAAGTCTGTCAGATTCA | 1238 |
| Crygf | GAGATCATGATGAGTGTATG | 1239 |
| Crygf | GCAGGAAGAGGTGGAAGGCA | 1240 |
| Crygf | GAATCTGACAGACTTATCCC | 1241 |
| Ctbp1 | GGTCTCTTTGGTTGGGTACA | 1242 |
| Ctbp1 | GAAGGATGCTGAAGGCCATA | 1243 |
| Ctbp1 | GTGTCCCAGAAGTTGAGGGA | 1244 |
| Ctbp1 | GGAAAGTACAGCTTTGCCAG | 1245 |
| Ctbp1 | GCAGGGACCATCCCTGGAGT | 1246 |
| Ctbp1 | GTAGAGATGTGGAGATGCAC | 1247 |
| Ctbp1 | GGTTTCCTGGGAGGCCCTAA | 1248 |
| Ctbp1 | GCCTCAGCAGATATGTAGGT | 1249 |
| Ctbp1 | GGTTTCCGAGGTTTCCTGGG | 1250 |
| Ctbp1 | GGAATTTGGGCAGCCTGAGA | 1251 |
| Ctbp2 | GTGAGAATAGAGGACCACGA | 1252 |
| Ctbp2 | GGGATGTGATGTGTTGGACA | 1253 |
| Ctbp2 | GGTCTTCAAAGTTGTGACCT | 1254 |
| Ctbp2 | GCACACAGGACAGACCTTGC | 1255 |
| Ctbp2 | GAGACACATTCATCTCCATG | 1256 |
| Ctbp2 | GTGTCACACTCCTCCCTAAA | 1257 |
| Ctbp2 | GAGTAGTGGGTTGGCCACCA | 1258 |
| Ctbp2 | GCGCCTCCCTTGAGACTCTG | 1259 |
| Ctbp2 | GAGCACAGCCACTGGAAAGG | 1260 |
| Ctbp2 | GTGTGCTTCTAAGCCCAGGC | 1261 |
| Ctcf | GAGTCACATTCCAAGGCTAT | 1262 |
| Ctcf | GTCGGAGAAGTGAGAGAGTG | 1263 |
| Ctcf | GGGATTAAGTACCACCGACT | 1264 |
| Ctcf | GTAACCTTAGGACTGCTTTC | 1265 |
| Ctcf | GGTATCAGAAGCCAGGAATA | 1266 |
| Ctcf | GCAAATAAAGGCATTGTCTT | 1267 |
| Ctcf | GATTAGAACACCTGCCAATA | 1268 |
| Ctcf | GGGACAGAGTCACCTCAGTC | 1269 |
| Ctcf | GGTGTGGTCTGCTATATCTC | 1270 |
| Ctcf | GGCATTGTCTTTGGAAAGAA | 1271 |
| Ctnnb1 | GTGAAGGAAGCGGGAGGTGA | 1272 |
| Ctnnb1 | GAGTAAACTCTGCTGCTGGC | 1273 |
| Ctnnb1 | GTTGATGACGTGTTTCTTTC | 1274 |
| Ctnnbl | GTCTTCCTTCCCAGGGTTAT | 1275 |
| Ctnnb1 | GGTCAGTAGAACCAGGCGTG | 1276 |
| Ctnnb1 | GGAGGTGATGGGTACGGAGG | 1277 |
| Ctnnb1 | GGATCCTATCCCAATAACCC | 1278 |
| Ctnnb1 | GCTAGAGGAATATGAATACA | 1279 |
| Ctnnb1 | GAAGCGGGAGGTGATGGGTA | 1280 |
| Ctnnbl | GGTAACACACTTCACATAGA | 1281 |
| Cux1 | GTGGCAGGGCTGCAAAGAAG | 1282 |
| Cux1 | GACGCAATGTACGTCATATA | 1283 |
| Cux1 | GGGTGGCAGGGCTGCAAAGA | 1284 |
| Cux1 | GGCCATCTACGTTTGTGCGG | 1285 |
| Cux1 | GTGCAATTGTGTCGTGGTAA | 1286 |
| Cux1 | GAGGGCTCATATGATTACAA | 1287 |
| Cux1 | GTCACCCTCCTTCCTGAGGG | 1288 |
| Cux1 | GAAGTCTATGCAGCAAACCA | 1289 |
| Cux1 | GTTGTCTTTGTGGGTGTCGA | 1290 |
| Cux1 | GAACTCGCGCGCGCTAAAGA | 1291 |
| Cux2 | GGTAAATATGCAGGCGACAA | 1292 |
| Cux2 | GGATGCTTGCTGCGTTTCTA | 1293 |
| Cux2 | GGACAATAGATCAATACCGT | 1294 |
| Cux2 | GCAGGAATTTATTGCACCAC | 1295 |
| Cux2 | GCCACTCGGAATTGCTAACT | 1296 |
| Cux2 | GTCTTTCTGAGGCCCTGGGA | 1297 |
| Cux2 | GCCTCTGTGGGACACACTGC | 1298 |
| Cux2 | GAGATAGCGTCTGCTCCATC | 1299 |
| Cux2 | GCGAATTTATGAGCCTTTAA | 1300 |
| Dbp | GAAAGAAGTGGGCTTCGGGA | 1301 |
| Dbp | GTGTTGGAGGGTCAGGTGAG | 1302 |
| Dbp | GGCATATCCCTTCATCTCAT | 1303 |
| Dbp | GGCGCAGTTCACTGAGTCGG | 1304 |
| Dbp | GGCGGGCGTAATCCTCGTTG | 1305 |
| Dbp | GTGAGGAAACTCAGAACAGG | 1306 |
| Dbp | GCTGAGAATGGCCAGGCCGT | 1307 |
| Dbp | GGTGTCAGTCACCTGGAGGG | 1308 |
| Dbp | GGCCTTCTTCCCTCCCTACA | 1309 |
| Dbx1 | GCGAAAGTGAGGGTTCGCGG | 1310 |
| Dbx1 | GTGTACGTGCAAGATCTGTT | 1311 |
| Dbx1 | GAGAAGTGTGCAGCCCTGCC | 1312 |
| Dbx1 | GAACGCACTAAATTTATCTG | 1313 |
| Dbx1 | GGACTCACTGTATAGCAGAG | 1314 |
| Dbx1 | GGAGGGTAGCTAGCCTTCCA | 1315 |
| Dbx1 | GTGGAATTCCCAGCCCGGTT | 1316 |
| Dbx1 | GGAAGAACTAAGTTCACACA | 1317 |
| Dbx1 | GACAGGTTTGCGCTAGCTAC | 1318 |
| Dbx1 | GTGGCAAAGAGCGAAAGTGA | 1319 |
| Dbx2 | GTTAACAGAAGGGAATAAAG | 1320 |
| Dbx2 | GATCAGACAATTCTGTGCTG | 1321 |
| Dbx2 | GGATGCTTCAAGACAAAGGA | 1322 |
| Dbx2 | GGAGATAGGTGCACTGTGTC | 1323 |
| Dbx2 | GAAAGGCAAAGTAAGGGTGG | 1324 |
| Dbx2 | GCGACCAAGTACATGTACCC | 1325 |
| Dbx2 | GATCTAGCTGAGAACCACAA | 1326 |
| Dbx2 | GGACTCCAGCAGCAGGGTCA | 1327 |
| Dbx2 | GTAACTATTGAGATGAGTGG | 1328 |
| Ddit3 | GGATTGGCCACCAGTGGCCT | 1329 |
| Ddit3 | GTTCAGGAAGGACAGCCGTT | 1330 |
| Ddit3 | GCACAGCAGTGGCCAGACAC | 1331 |
| Ddit3 | GTCAATCCAGGTGAACAAAT | 1332 |
| Ddit3 | GGAGTCAGGAATGTCAGGTC | 1333 |
| Ddit3 | GCAATTGCTTGGTGACCTGT | 1334 |
| Ddit3 | GCCGTGAGACTCCTGAGTGG | 1335 |
| Ddit3 | GAGAAGCGGGTGGACTATCA | 1336 |
| Ddit3 | GACATGTTGACCTGGAGAGG | 1337 |
| Ddit3 | GAACTCAGACAGCTAGAGGC | 1338 |
| Deaf1 | GACAAAGGTAGACTATATGT | 1339 |
| Deaf1 | GGTGTGATATGGTTGTATAC | 1340 |
| Deaf1 | GGCTTCTAGAGCTGAAGTGG | 1341 |
| Deaf1 | GTGTGCTCAGGATGAGCCAT | 1342 |
| Deaf1 | GCTGAGAGCACCTGAGAGTG | 1343 |
| Deaf1 | GATCACTGAGAGTCTAGGGT | 1344 |
| Deaf1 | GAGTGTATTGTGGATATGCC | 1345 |
| Deaf1 | GCATCTGAAGAGACCCAGGC | 1346 |
| Deaf1 | GCAGGTGAGCACTTCAGCCA | 1347 |
| Deaf1 | GTCTCCTCAGCAGCCAAGGA | 1348 |
| Dlx1 | GTAGACCCATGGTCGCTCTC | 1349 |
| Dlx1 | GTACAACAAATGGTCTAGTG | 1350 |
| Dlx1 | GTCGGATGGCCGGATTGCCT | 1351 |
| Dlx1 | GGGACAATTATTGCAGGTGA | 1352 |
| Dlx1 | GACGCCTAACCCTGAACCGC | 1353 |
| Dlx1 | GTTGAACCTACCTTCAGGGT | 1354 |
| Dlx1 | GAGGAGGAGGTGGGAAGCTG | 1355 |
| Dlx1 | GTGGTGTGTGGTAGTAGTGG | 1356 |
| Dlx1 | GCTTCCCACCTCCTCCTCCA | 1357 |
| Dlx1 | GCAATAATTGTCCCAGTGGT | 1358 |
| Dlx2 | GATTCTGAGGTTCCCTCCTT | 1359 |
| Dlx2 | GTAGGAGGTTGTTACAGGCC | 1360 |
| Dlx2 | GCCTTCAAAGTCGTTTGCAT | 1361 |
| Dlx2 | GTGGATCAAGCTACACTCTG | 1362 |
| Dlx2 | GCATCCACTTCCCAGGCTAC | 1363 |
| Dlx2 | GTCAGCCACTTTGCACCTGA | 1364 |
| Dlx2 | GGAGCCTTATGTCCTGTTGC | 1365 |
| Dlx2 | GAGATGTAAATCGTTAGACT | 1366 |
| Dlx2 | GCCTTCAGGACAGGCTTGAT | 1367 |
| Dlx2 | GGATGGACTCAGCGCAGTGA | 1368 |
| Dlx3 | GCTGGCTTTCTGTGTTCTTC | 1369 |
| Dlx3 | GTGTCTCTGTATGTAGTGTG | 1370 |
| Dlx3 | GCTGAGGCACAGTTGATGGA | 1371 |
| Dlx3 | GTTGATGGAAGGCCTGAAGC | 1372 |
| Dlx3 | GGCTGCAAGTCTTGCCTTCG | 1373 |
| Dlx3 | GGAGAAGCCTCCTTCCTCCA | 1374 |
| Dlx3 | GCTCCCAAACCTATCCTTGG | 1375 |
| Dlx3 | GTGGCTCTTCCATTCATGAA | 1376 |
| Dlx3 | GGGCTTAGGTGAGATGAGGA | 1377 |
| Dlx3 | GGTAAGCAGGCAGACAGGAA | 1378 |
| Dlx4 | GCTGGAGGGAATCTGCTGTC | 1379 |
| Dlx4 | GTAACGATGTTCAAGGTGCT | 1380 |
| Dlx4 | GATGTGCTTTGAGGCAGGGC | 1381 |
| Dlx4 | GTGATCCTGGAGCTCAGATT | 1382 |
| Dlx4 | GACAGGTCCAACTTTCTTTC | 1383 |
| Dlx4 | GCAACAGATGCTTGCATACA | 1384 |
| Dlx4 | GAACAGAGACAGGCAAATCC | 1385 |
| Dlx4 | GAATCTAGTTTGATGGCTCC | 1386 |
| Dlx4 | GGAGATCCTCTTTGTCTGGT | 1387 |
| Dlx4 | GATTCCCTCCAGCAGCCTCA | 1388 |
| Dlx5 | GTTTCCAGTATCAGGGTCAT | 1389 |
| Dlx5 | GCAAGGAACCAAGTCCGCTT | 1390 |
| Dlx5 | GGCAAGGAACCAAGTCCGCT | 1391 |
| Dlx5 | GGCCAGTCTTTCAGCACTTC | 1392 |
| Dlx5 | GCTCCCTGCTGAGACATGTA | 1393 |
| Dlx5 | GAGATTGGTGAATTTCAAAG | 1394 |
| Dlx5 | GGAGAACAGCATTGTCTTAG | 1395 |
| Dlx5 | GCAGCTCCAGATTCCAGAGA | 1396 |
| Dlx5 | GCAGGAGGTCAGTCCCTCTC | 1397 |
| Dlx5 | GAATCTTCTGGTTCCTCTTC | 1398 |
| Dlx6 | GACTGGGTGGGAGAAATCTG | 1399 |
| Dlx6 | GGTGTGTCTGGAGGTTGCGG | 1400 |
| Dlx6 | GGTAAGCTCTAGGAGCTTGC | 1401 |
| Dlx6 | GGTTCTCCTACCTGGTGGCT | 1402 |
| Dlx6 | GTCCATCTTTGAAACAGAAG | 1403 |
| Dlx6 | GCCTGTAATGATTATGGACT | 1404 |
| Dlx6 | GCTCCCTTGGGAGTAGAGTT | 1405 |
| Dlx6 | GAGTTACTGAACCGGCACCC | 1406 |
| Dlx6 | GTCGAATGGTTTGTCTCCAA | 1407 |
| Dmbx1 | GGAGCATGCATATGCAATTA | 1408 |
| Dmbx1 | GATGAGCATAGGACCCAACC | 1409 |
| Dmbxl | GACTGAACGGATGGAGGTCT | 1410 |
| Dmbx1 | GTGTGTGTTCTATGCTTGTG | 1411 |
| Dmbx1 | GCACACACCTCAGACACACA | 1412 |
| Dmbx1 | GGAAGAGGTCGTTATGCAGG | 1413 |
| Dmbx1 | GGGAAATGATGGACGCTGCC | 1414 |
| Dmbx1 | GTAGCCAATCTTGCACTACA | 1415 |
| Dmbx1 | GGGATCCTGGTGGGAGAGAA | 1416 |
| Dmbx1 | GGCTCCCTGCCTCTAACTCT | 1417 |
| Dmrt1 | GATAACAGATATTAGCTGCC | 1418 |
| Dmrt1 | GAACCTTCCGAGGATTGCGT | 1419 |
| Dmrt1 | GTACTGGTCCAAGCTGGAAG | 1420 |
| Dmrt1 | GCCTCTTGGCTAACAGAGAC | 1421 |
| Dmrt1 | GACACTGGCAGAGAGCAGGT | 1422 |
| Dmrt1 | GTGGTCCTGAGATGGAAGCC | 1423 |
| Dmrt1 | GAGGAGGCAGTGGTACACAT | 1424 |
| Dmrt1 | GAGCGCCAATGGTTGCTTGG | 1425 |
| Dmrt1 | GCAATTACATGTGTACCATC | 1426 |
| Dmrt1 | GGTAGGTGAATGGTTGCATG | 1427 |
| Dmrt2 | GTTCTCGAGAAGGTAACTAA | 1428 |
| Dmrt2 | GGTGGTGGATAATACTAGGA | 1429 |
| Dmrt2 | GTGTATGAACCAGTCAGATG | 1430 |
| Dmrt2 | GCAGAGAGTAGAGCCGGGAG | 1431 |
| Dmrt2 | GATAGGGAGCCCTAAGACAG | 1432 |
| Dmrt2 | GAACTTAAACGCACCCACCC | 1433 |
| Dmrt2 | GGCAAAGACCAGGCTCTCTA | 1434 |
| Dmrt2 | GATCATGTGGATAACGGGCT | 1435 |
| Dmrt2 | GACCACAAATGAGGAAACTA | 1436 |
| Dmrt2 | GTGGGAAAGTGGTTCCCTGG | 1437 |
| Dmrt3 | GAGGAGTTGATAGTTGTTCC | 1438 |
| Dmrt3 | GTTACAATAGACTTTGAGGC | 1439 |
| Dmrt3 | GATGTGCACTGGAGTGAAAC | 1440 |
| Dmrt3 | GGGTGAAAGTTAACGTAAAC | 1441 |
| Dmrt3 | GGGAATTGAGGGTACTCCGC | 1442 |
| Dmrt3 | GAATGGCTGAGGCCAAGGGT | 1443 |
| Dmrt3 | GCCAAGGGTGGGAAGGAAAG | 1444 |
| Dmrt3 | GCTTTAACAACTCAGTGGGA | 1445 |
| Dmrt3 | GAAGGGACCAGGGAAGGAAG | 1446 |
| Dmrt3 | GAAGGAGCCAACGGAAGTCC | 1447 |
| Dmrta1 | GTGCAGACTTCATCTAGGAA | 1448 |
| Dmrta1 | GCGGTTTCTTGCTCTGGGAC | 1449 |
| Dmrta1 | GCTCTCTGTTTCTACTAAGT | 1450 |
| Dmrta1 | GGGCGGAGAGTGGGACTTTC | 1451 |
| Dmrta1 | GTCTAGACTCAGAGGCTCAC | 1452 |
| Dmrta1 | GACAGGTTAATTCAGAGTCA | 1453 |
| Dmrta1 | GAGCACATGCAGATTATACA | 1454 |
| Dmrta1 | GAGGACCTAGGGCGGAGAGT | 1455 |
| Dmrta2 | GCTCCGAGGTAGTTGAGAGC | 1456 |
| Dmrta2 | GCAGAAGCTAACATCAGGAA | 1457 |
| Dmrta2 | GAGTGTGCATACTCGCGACC | 1458 |
| Dmrta2 | GACTGTGTCACCCTCCATGC | 1459 |
| Dmrta2 | GAAAGGCAAGGAGGGCACAG | 1460 |
| Dmrta2 | GGCATTCACGTGAAGAATTA | 1461 |
| Dmrta2 | GCTTGGACCCACGTTCCTCC | 1462 |
| Dmrta2 | GCATTAAAGGTGATAGAGGG | 1463 |
| Dmrta2 | GGAAAGGCAAGGAGGGCACA | 1464 |
| Dmrta2 | GGGAGCACATATCCAACAGG | 1465 |
| Dmrtb1 | GTCAGGGATGAAAGATTCGC | 1466 |
| Dmrtb1 | GCCTCCTGACTGGAGAGTCT | 1467 |
| Dmrtb1 | GCCCTGCTGTGAAATCTTTC | 1468 |
| Dmrtb1 | GGAATAAAGGCCATCCTGGA | 1469 |
| Dmrtb1 | GGGTGTCATCTGAAGTGGGT | 1470 |
| Dmrtb1 | GGTGTCATCTGAAGTGGGTA | 1471 |
| DMrtb1 | GCAAGTGAAGCAGGAATGAG | 1472 |
| Dmrtb1 | GACAAAGCATGTGTTCCAGT | 1473 |
| Dmrtb1 | GAAATCTTTCTGGTGATGCC | 1474 |
| Dmrtc2 | GTCTGTATCTACTCTCTCCC | 1475 |
| Dmrtc2 | GCAATCAGTGAGCTGGAAAG | 1476 |
| Dmrtc2 | GATGTCTCCTCATGTATTGG | 1477 |
| Dmrtc2 | GAGTGATGAGAGGTGTCCTT | 1478 |
| Dmrtc2 | GGTGCTATAAGGCCACACAT | 1479 |
| Dmrtc2 | GATTGTTGCCGCGGAGAAGC | 1480 |
| Dmrtc2 | GCAAGATAATTGCATTTCCC | 1481 |
| Dmrtc2 | GGATCAGCACCATGGCCAGG | 1482 |
| Dmrtc2 | GGTGCTTTCTGCCCAGCCTG | 1483 |
| Dmrtc2 | GAAGTGAACGCTTAAGCGGT | 1484 |
| Drd1a | GATCACCAGTCTGTGGAACT | 1485 |
| Drd1a | GCTCCAGCCTTGGCACACAG | 1486 |
| Drd1a | GGACTGACTGAGTCCATATC | 1487 |
| Drd1a | GGTGACCTGAGGGCAATTTG | 1488 |
| Drd1a | GTGGCAGCAAGACTGCCAGT | 1489 |
| Drd1a | GCCAGAATCTGGACGGTGAG | 1490 |
| Drd1a | GAGGCTGCTGAGTTTATGCC | 1491 |
| Drd1a | GGAGCACTTTCCCTCCCTGA | 1492 |
| Drd1a | GCAACAATGTAGTAACACTT | 1493 |
| Drd1a | GAATCTGGACGGTGAGAGGC | 1494 |
| E2f1 | GCAATCAGAAATGCTGATGG | 1495 |
| E2f1 | GATCAACACATTATCTGGGA | 1496 |
| E2f1 | GGGAGCCAGGAAATGAGTAA | 1497 |
| E2f1 | GTTAAGAATTGGAGAGGCCA | 1498 |
| E2f1 | GAGTAATGTGGTCAGAGTTG | 1499 |
| E2f1 | GAGCATTGGTTGCGGCGTGC | 1500 |
| E2f1 | GGCCGTCTCCAGTTCTCATG | 1501 |
| E2f1 | GCTACAGGGAGCTCTCAAGC | 1502 |
| E2f1 | GCTGCTTCTCAGGCCCTTTC | 1503 |
| E2f2 | GCGAATCTGTGAATGACCCG | 1504 |
| E2f2 | GATTCAGGAAGGAAGAGTGC | 1505 |
| E2f2 | GGTAAGACCAGGGAGTCGGA | 1506 |
| E2f2 | GACAGGCACAGCGTGGGTGA | 1507 |
| E2f2 | GTAAGACCAGGGAGTCGGAG | 1508 |
| E2f2 | GGAATGGAGGTGGCAGGGAG | 1509 |
| E2f2 | GGACCCTTCCATGGATTCCG | 1510 |
| E2f2 | GGAGTTTCGCTGCCTGGGAA | 1511 |
| E2f2 | GGAGTCACAGAGAAATCTCA | 1512 |
| E2f2 | GAGAAAGCTGCTACTCGGCC | 1513 |
| E2f3 | GGGATACGGTTTACGCGCCA | 1514 |
| E2f3 | GGTAAGCAGGACAIAAACCT | 1515 |
| E2f3 | GCTCTATGCAAATAGAGCCC | 1516 |
| E2f3 | GCTTTCCTGCGGACGTTGGG | 1517 |
| E2f3 | GGGCTAATCATGAAGCTGCC | 1518 |
| E2f3 | GTCTGGAGAGAGGAGGGTCC | 1519 |
| E2f3 | GGCAAAGTCCTACTCTCCCA | 1520 |
| E2f3 | GGTTTGCAAAGACTGGAATC | 1521 |
| E2f3 | GAGCAGGCTTCTTAGGAGGT | 1522 |
| E2f4 | GCTGAGGCTCTACCACATAG | 1523 |
| E2f4 | GTTAGACTGGGCTGGAGGGC | 1524 |
| E2f4 | GCGCCATTTCCTGTTGGGTG | 1525 |
| E2f4 | GGGCGTTACAGAGCAGGAAA | 1526 |
| E2f4 | GGTTCTCGCTTCTCAACTGC | 1527 |
| E2f4 | GGCTACAAGCAGGTGAGTGG | 1528 |
| E2f4 | GCACTAGGAAAGGGATTACA | 1529 |
| E2f4 | GTCAGTGGTGCAGTCCTACC | 1530 |
| E2f4 | GAGCCTCGTTGGCTGGGCTT | 1531 |
| E2f4 | GTCTCGGACCTCACAAACCC | 1532 |
| E2f5 | GGCAGGTAAGGAAAGAGCTG | 1533 |
| E2f5 | GCCTAGTAACGCACTCTCCG | 1534 |
| E2f5 | GTCTACTTCCTTCACCGTCA | 1535 |
| E2f5 | GCAGGTAAGGAAAGAGCTGG | 1536 |
| E2f5 | GTAACGCACTCTCCGCGGAG | 1537 |
| E2f5 | GAATGCCCAAATTAACAGTA | 1538 |
| E2f5 | GATCAGGTGCAAGTATTGTA | 1539 |
| E2f5 | GTAGAAGTAGAATACAACTG | 1540 |
| E2f5 | GGACTTAGTGAGGGCGGAAG | 1541 |
| E2f5 | GTCATACATCTTCATCAACC | 1542 |
| E2f6 | GTGTGTGGTGGGATGGGTTG | 1543 |
| E2f6 | GTTTGGCATTCAACAGAGGA | 1544 |
| E2f6 | GAGAGTTTCTCAGAGCAACT | 1545 |
| E2f6 | GACCTGGGACTTAGTGAGGG | 1546 |
| E2f6 | GCGCTGCGCATGTGCAAACG | 1547 |
| E2f6 | GAAGCTGCGGGAGTGAGACC | 1548 |
| E2f7 | GTGAACCCTGGTTAGCACCT | 1549 |
| E2f7 | GGACTTTGTTGCTTTAATTT | 1550 |
| E2f7 | GGAACAGTCAAGAATATCTC | 1551 |
| E2f7 | GTAATACACTCTGAAACCCA | 1552 |
| E2f7 | GTTTCTAGTAAGGACTAGCT | 1553 |
| E2f7 | GTGCTTTGTACTTACATAAG | 1554 |
| E2f7 | GCCAGGTGACACGTGAACCC | 1555 |
| E2f7 | GTCTTAGCCGTTCCGTGCAA | 1556 |
| E4f1 | GTGGAGTTGACCTGAGCAAG | 1557 |
| E4f1 | GGGCGTGGCTTGTGTTAAAT | 1558 |
| E4f1 | GTTGCAATGTCAGAATTTCC | 1559 |
| E4f1 | GCGAGCAGGGACTGAGCAAG | 1560 |
| E4f1 | GCCAGACATCAGGGCGGAAG | 1561 |
| E4f1 | GGAGTTGACCTGAGCAAGTG | 1562 |
| E4f1 | GGTCCAAAGTGAACTATCCG | 1563 |
| E4f1 | GCGGTCTAGCGCGTCAGTAG | 1564 |
| Ebf1 | GATGACGTTATGCAAAGAAG | 1565 |
| Ebf1 | GAAGAGCTGGACACCTGGGA | 1566 |
| Ebf1 | GAAGCCCTAGCTTAAGACTT | 1567 |
| Ebf1 | GGCTGCCAAGGACTCCTTGG | 1568 |
| Ebf1 | GCGGTCTACTAAAGTCGTAT | 1569 |
| Ebf1 | GTAGACAGATACACCGGAGG | 1570 |
| Ebf1 | GGGCAGAGGGAAGGAGATGG | 1571 |
| Ebf1 | GCCCAACAGCATTCGTGTCT | 1572 |
| Ebf1 | GGTCTGTCCAGGGAGGAAAG | 1573 |
| Ebf1 | GCTAAGGAGGAAATGAGTGG | 1574 |
| Ebf2 | GTTTGTCAAGGTCTTAGGGA | 1575 |
| Ebf2 | GTATGAGAGAAGCCGAGGAT | 1576 |
| Ebf2 | GAGCTGATCAAAGTCTCCTT | 1577 |
| Ebf2 | GATAACTGCCGAATGCAACT | 1578 |
| Ebf2 | GAAGCAATCATTTCGTGCGA | 1579 |
| Ebf2 | GCGGATTTGCCTCTAGATGC | 1580 |
| Ebf2 | GAACTTGTCACTGGGAAGGA | 1581 |
| Ebf2 | GACCCTACAGATTCATTCCC | 1582 |
| Ebf2 | GGTTATTCTCACGTAGCTGG | 1583 |
| Ebf2 | GCAGCTGATTGTCTGCTCCA | 1584 |
| Ebf3 | GACCTCTCCTAAAGGTCAGA | 1585 |
| Ebf3 | GCAGAGATGAAGTTGGGAAA | 1586 |
| Ebf3 | GGGTGGAGACCCTTCCTGGA | 1587 |
| Ebf3 | GGCTCCTCTGCAGCAGGCTA | 1588 |
| E3f3 | GCTCACACTGGGTGAGCGAC | 1589 |
| Ebf3 | GGCAAAGCCTGCTGAATACA | 1590 |
| Ebf3 | GAGGAGATTCCAGGAGAGGG | 1591 |
| Ebf3 | GGAATACTTCCCACCCTCCA | 1592 |
| Ebf3 | GGAGGAACCTGTCTCCGACG | 1593 |
| Ebf3 | GGGAGTGTGGATCCCTAGAA | 1594 |
| Egr1 | GAGAGATCCCGCTGGTCTCC | 1595 |
| Egr1 | GGTTGAGGATCCCACCTTTG | 1596 |
| Egr1 | GGAGACTGGGCAAAGTCAAG | 1597 |
| Egr1 | GAGAGCCTTAGACGCAGTGA | 1598 |
| Egr1 | GCAAAGAGCCCAGGAGGGAC | 1599 |
| Egr1 | GTGGGAAGGGTCTGTAGGTA | 1600 |
| Egr1 | GGGAGGGCTTCACGTCACTC | 1601 |
| Egr1 | GCCCTCCCATCCAAGAGTGG | 1602 |
| Egr1 | GGATCTGTTGGTTCTTGTGA | 1603 |
| Egr1 | GTCACTTTCCAGGTGTCACC | 1604 |
| Egr2 | GGGCGTTTGAAGTAATGGCG | 1605 |
| Egr2 | GAAGCTCTAAGCAAGGGCGT | 1606 |
| Egr2 | GGTGTGTAGTGTGTAGCGTA | 1607 |
| Egr2 | GATGAAGGCAGTGTCTTCCT | 1608 |
| Egr2 | GAAGTGGTTCCATACCATCA | 1609 |
| Egr2 | GTAGCGTAAGGTGTGTTGAG | 1610 |
| Egr2 | GCTCCGGGATCTACGTAGCC | 1611 |
| Egr2 | GCAAATAGAGGTCCCGGCGG | 1612 |
| Egr2 | GTAACCTGAGTCCCACCGCC | 1613 |
| Egr2 | GGCTCGGAGTATTTATGGGC | 1614 |
| Egr3 | GCTACGTCACGGAGCTTTCC | 1615 |
| Egr3 | GTTTGGAGGAGAACATTGGG | 1616 |
| Egr3 | GAGTGGGAGTGTTGACAAGA | 1617 |
| Egr3 | GTTGTCCTCATTGCTGCCTG | 1618 |
| Egr3 | GGCTCAGATAAATAGACTGG | 1619 |
| Egr3 | GGCTGGAGAGCCAGGCAATT | 1620 |
| Egr3 | GCAAAGAGGGTAATCCTCTC | 1621 |
| Egr3 | GGCACCCTCAGGCAGCAATG | 1622 |
| Egr3 | GTGTTGACAAGAAGGAAGAG | 1623 |
| Egr3 | GAATCACACCGGGTTGGCGG | 1624 |
| Elf1 | GAGTAACATAATTAGATGGC | 1625 |
| Elf1 | GTGGACCCAATTATTCTGCT | 1626 |
| Elf1 | GGCTCAAGGCTTTCAGCATA | 1627 |
| Elf1 | GCCATATATCCCTTCATATA | 1628 |
| Elf1 | GGTCAAACATGCAAATGCAC | 1629 |
| Elf1 | GACATCAGIGAGCGGGATCG | 1630 |
| Elf1 | GGATGGCTGACTGAGCACTG | 1631 |
| Elf1 | GCAAGAAGTCCACTGTTCAC | 1632 |
| Elf1 | GGGTTAATGAGTAGCCAGGT | 1633 |
| Elf1 | GCAGCTTGTTCCAAGGTGTA | 1634 |
| Elf2 | GATTAAGCTACATATCCTTG | 1635 |
| Elf2 | GGTGAAGGAGCGCGTGTGTG | 1636 |
| Elf2 | GAGGATCGTTTATTAGCCAT | 1637 |
| Elf2 | GACAGTAATATAACGCGATA | 1638 |
| Elf2 | GAGGTAAGGTTAGGATTACT | 1639 |
| Elf2 | GTCCCTGGAGGTCTTGGGAG | 1640 |
| Elf2 | GTTGGGCGCTGAGAAGAGGG | 1641 |
| Elf2 | GCTGCAAACGCAGGACATCC | 1642 |
| Elf2 | GGTCCCTGGAGGTCTTGGGA | 1643 |
| Elf2 | GGGAGTATAAATAGCCGGCC | 1644 |
| Elf3 | GCAGCCCTGACCTAGAGGAA | 1645 |
| Elf3 | GCAGATACTAATGGAGTGGG | 1646 |
| Elf3 | GCAGGCAGATACTAATGGAG | 1647 |
| Elf3 | GACGTACGCCGAAGACCTGG | 1648 |
| Elf3 | GCTTCAGCAACCATCGCGTT | 1649 |
| Elf3 | GAGTCATTACAAAGACAAAC | 1650 |
| Elf3 | GGACGGAATCAATACTCAGG | 1651 |
| Elf3 | GCTGGTTCTCCCACATTCCA | 1652 |
| Elf3 | GAGAGCGCCACAGGCACCAA | 1653 |
| Elf5 | GGAAAGCTTCACTATGCCTG | 1654 |
| Elf5 | GCAAATCTCTAGCCATGGGT | 1655 |
| Elf5 | GACGGCCTAGGCAGTCATCT | 1656 |
| Elf5 | GAGGCCTTACTCAGGCTGCC | 1657 |
| Elf5 | GAAAGCTTCACTATGCCTGT | 1658 |
| Elf5 | GGAAAGGCCTAGGCTGGGTA | 1659 |
| Elf5 | GTGTAGGCAGAGCAGAGGGC | 1660 |
| Elf5 | GGTGTAGCAGGGTCCTGGAA | 1661 |
| Elf5 | GGAACGGAACCCACGAAAGG | 1662 |
| Elf5 | GCCTGAGATTGAGAGAGGAA | 1663 |
| Elk1 | GTAGGACTCAACTCTGTGGA | 1664 |
| Elk1 | GTGCTTTAATATTGGAGGCT | 1665 |
| Elk1 | GAAACAGGACTTATTTAGAA | 1666 |
| Elk1 | GCCAAGGATCCTAAGCACAG | 1667 |
| Elk1 | GTGTACAGCACCACCTACTT | 1668 |
| Elk1 | GCGTCCTCCTGCTTGCTGAT | 1669 |
| Elk1 | GCAGTCCTCCTTGACCCAAT | 1670 |
| Eik1 | GCTGGGAAGATGCAGTCAAT | 1671 |
| Elk1 | GACAGGAGAAAGCCAAAGAA | 1672 |
| Elk1 | GGACAACGTATACTGAACCG | 1673 |
| Elk3 | GAGTTTAGGGACAGGAGGGA | 1674 |
| Elk3 | GATCCTGGCCATTGTCCTCA | 1675 |
| Elk3 | GTACCCTGTGGTTTCAAGAC | 1676 |
| Elk3 | GAAGAGGCTTAAGTTATTTG | 1677 |
| Elk3 | GTCGGATAGAGTTACTGTCG | 1678 |
| Elk3 | GAGAGTTGGGCATTGCTCGG | 1679 |
| Elk3 | GGCTGGAGGAACTGTATACA | 1680 |
| Elk3 | GCGTACTTATCCCAGACCAA | 1681 |
| Elk3 | GACACAAGGCTCCTAGTTTG | 1682 |
| Elk4 | GTTGTCATCTTCTCTTTAAC | 1683 |
| Elk4 | GATGGTACAAGGTAGACACT | 1684 |
| Elk4 | GAAACAAGTCACACTTGGTC | 1685 |
| Elk4 | GTGCACGGGACGGACTAACA | 1686 |
| Elk4 | GGACCAAGCTAAGTTGGTAA | 1687 |
| Elk4 | GAAATCAACACCCAATTCCA | 1688 |
| Elk4 | GGTAGACACTTGGTAAATAG | 1689 |
| Elk4 | GGACATTCGTACTTCCTCGC | 1690 |
| Elk4 | GGCTTAGTTATCTTATGCTA | 1691 |
| Emx1 | GGAGCCTGAGGATGACCTGT | 1692 |
| Emx1 | GCAGAGATCCGGAGAAGGCA | 1693 |
| Emx1 | GGTCTCCTTGGAGCAAGGTC | 1694 |
| Emx1 | GGAGTGGCATCCTAGCTTCT | 1695 |
| Emx1 | GTTCTCTGGAGAATCTAGGC | 1696 |
| Emx1 | GTCGCATATGGCGGGAGAGG | 1697 |
| Emx1 | GATGCAGAGTGGAGGGTAGG | 1698 |
| Emx1 | GAGAGCCCTAACACCGAGTT | 1699 |
| Emx1 | GCTTCTCCAGACCAAGGCTC | 1700 |
| Emx1 | GCAGAGTGGAGGGTAGGAGG | 1701 |
| Emx2 | GTCTCCTGTTTGGTTTCTTG | 1702 |
| Emx2 | GCTAATGATGCTAATGCTGG | 1703 |
| Emx2 | GGCCTCCAGTCTCTTGCATG | 1704 |
| Emx2 | GAAGCGGGTTAGCCCTTGCC | 1705 |
| Emx2 | GCTAGGCCATCTATGAGCTC | 1706 |
| Emx2 | GGTGTGGGTGCAGTAGGAGG | 1707 |
| Emx2 | GACATCTGTTGTCCCAGGGC | 1708 |
| Emx2 | GAAGACTGGAGCCCAAAGAA | 1709 |
| Emx2 | GACTGCAAACGCGTGGACCC | 1710 |
| Emx2 | GGAAAGGAGTCTTGGGTCCT | 1711 |
| En1 | GACTTTGCGGATAAATAATC | 1712 |
| En1 | GTTCTGCCAGGATCTCCAAC | 1713 |
| En1 | GTGGGTGAGAAGCTACAGCG | 1714 |
| En1 | GAGAATCTCCCGACTTCTCT | 1715 |
| En1 | GTGAGGGCAACTGGAGATTT | 1716 |
| En1 | GCCAGGATGGCAGACAGGTA | 1717 |
| En1 | GATCCGAGAAAGCTAGAATT | 1718 |
| En1 | GTCAGAAACTATGACATTTG | 1719 |
| En1 | GCTTGCCAGGACGTCAGCAC | 1720 |
| En1 | GTGGAGAAGCCTCAGAAAGT | 1721 |
| En2 | GTGCAGGAGACGCATGCATA | 1722 |
| En2 | GAGGCACGTGTCCAGGAGAC | 1723 |
| En2 | GAACTGCCAGGTCCTGGTGA | 1724 |
| En2 | GAGCCTACAGAACCCAGGCA | 1725 |
| En2 | GTGGCCTGGTGGCTCAACAT | 1726 |
| En2 | GCAAGGGCAATAACTCCCAA | 1727 |
| En2 | GGGCACGGCCACTTTAAAGG | 1728 |
| En2 | GTGGCTCAACATAGGAAATG | 1729 |
| En2 | GCCTCCTATAAGGAACTGCC | 1730 |
| En2 | GGCCTGGTATGTAAGTGGGA | 1731 |
| Eomes | GATGATACCATCTTGGCCTG | 1732 |
| Eomes | GTGTTTCTTTAAGCGTCTTT | 1733 |
| Eomes | GCTTGGAAACTTGTGAGCGG | 1734 |
| Eomes | GGTGTTTCTTTAAGCGTCTT | 1735 |
| Eomes | GACTGTTTGCGGAAACGCAG | 1736 |
| Eomes | GGCACCGTTCAGACCCACTC | 1737 |
| Eomes | GCCCGAGACCAAATCGGAGC | 1738 |
| Eomes | GAGGGTGTGCGCAGAGACTT | 1739 |
| Eomes | GCTCTATGGCGCCGGAGAAA | 1740 |
| Eomes | GTCCTGCTGTTTGTGCACCC | 1741 |
| Ep300 | GCTCCTAAGTCTAGTGTGTA | 1742 |
| Ep300 | GTTTGGGATCCTCAAATATA | 1743 |
| Ep300 | GGTACCTGGCTGGAGAGCAG | 1744 |
| Ep300 | GAGTGAGGAGGGTACCTGGC | 1745 |
| Ep300 | GTTCCAAAGATCAACCTGAG | 1746 |
| Ep300 | GAACCTGCCTGAAACTTCCA | 1747 |
| Ep300 | GCCGCTACCGCTATCCTGTA | 1748 |
| Ep300 | GCTACCGCTATCCTGTAAGG | 1749 |
| Ep300 | GAATCCTCCTTACAGGATAG | 1750 |
| Epas1 | GAAAGCACGGTCCCTCAAAT | 1751 |
| Epas1 | GACTTGCATAGAGCAGAGCC | 1752 |
| Epas1 | GGGAGCCCACGGTGATACTG | 1753 |
| Epas1 | GTTAGCGCAGGACTGAGTAA | 1754 |
| Epas1 | GAAATCAGTTGACACACCTG | 1755 |
| Epas1 | GAATAAAGATGGTACGGTTT | 1756 |
| Epas1 | GAGCGCAGCTCCAGAGAAAG | 1757 |
| Epas1 | GAGGATTGTACGGCCGCCTC | 1758 |
| Epas1 | GACAAGAACAAGAGCCGACA | 1759 |
| Epas1 | GGGCGATACCTGTAACCCGC | 1760 |
| Erf | GAGAGTGGGTAGGAGAAGTA | 1761 |
| Erf | GCTGAATAGGAACCCAACAA | 1762 |
| Erf | GCTGCAGCAGATAGGAGGAA | 1763 |
| Erf | GAGTTACCAAAGGAAGAGAT | 1764 |
| Erf | GACCAAAGGCCCGAGCGTAG | 1765 |
| Erf | GAGGAAAGGAATTATATGAA | 1766 |
| Erf | GGAAGTGACCAGAATGCATT | 1767 |
| Erf | GATGCGGCAAGCAAGAGGGA | 1768 |
| Erf | GCGCACTCACACACGCTTGC | 1769 |
| Esr1 | GTCACTGAGCATCTTATTCA | 1770 |
| Esr1 | GACAGTAGTCAGTAGGCTAT | 1771 |
| Esr1 | GTTTACAGACAGTAGTCAGT | 1772 |
| Esr1 | GAGCGTGCAAACTATGGGTT | 1773 |
| Esr1 | GCATCTGCTGTCTTGAGGTT | 1774 |
| Esr1 | GTGGAAGTAAGAATGGTATC | 1775 |
| Esr1 | GTTTGGTCCAGAGTCTGCAC | 1776 |
| Esr1 | GACTCTACTCTTAGAGAAGC | 1777 |
| Esr1 | GGAGAATGATGTTGGGTGTT | 1778 |
| Esr1 | GAGTGAAGTGTTGGGTCGGG | 1779 |
| Esr2 | GTGAGAGAGACAGGGAGACA | 1780 |
| Esr2 | GCTGGGTTAAGCTTGCACTG | 1781 |
| Esr2 | GGCAGGTAAAGGTGGTGTGA | 1782 |
| Esr2 | GTTCACAGAACCCAAGGAGG | 1783 |
| Esr2 | GAGTCCATCCTGGTGAGGAT | 1784 |
| Esr2 | GACCTGGAAAGAGTGTGGGA | 1785 |
| Esr2 | GCTCCCGGTTTGTGGTCACG | 1786 |
| Esr2 | GCTTTCATAGACATCTTCCA | 1787 |
| Esr2 | GGGACATTCTATCTCACAAA | 1788 |
| Esrra | GGGTGGAGTGCTCACTGATG | 1789 |
| Esrra | GCTCACTCTAACTAGTTATC | 1790 |
| Esrra | GGTGGAGTGCTCACTGATGA | 1791 |
| Esrra | GGAAGCCACATCGAACCTAC | 1792 |
| Esrra | GTTCTGGATCTCAGCCGGGT | 1793 |
| Esrra | GATGGGTGTGCCATAAGGGT | 1794 |
| Esrra | GTGCGATGTGAAGAATGGAG | 1795 |
| Esrra | GGGACACTGGTTTCAGCCCT | 1796 |
| Esrra | GTAGGCACAGGCCGACTCAA | 1797 |
| Esrra | GCGTCCTACTAGGAGGAACC | 1798 |
| Esrrb | GTCAATTCAGAAGTCAACCT | 1799 |
| Esrrb | GTATCTGTATCCCAGTAGAG | 1800 |
| Esrrb | GCAGGAACCACAAGGCTATG | 1801 |
| Esrrb | GTCATGTAGAAACCAACTCA | 1802 |
| Esrrb | GTCCACCTCTTACATCATGG | 1803 |
| Esrrb | GGTGAGTGAGTGACACCCTC | 1804 |
| Esrrb | GCTTCAGGTATTGGAATGAA | 1805 |
| Esrrb | GGTGGGACTGTTGGAAGGGA | 1806 |
| Esrrb | GCAGGGAGACTGTGTAGGTA | 1807 |
| Esrrb | GGTTAGTGGGCTCCAAGTGT | 1808 |
| Esrrg | GAGAGGGCCTGTGCTTCTGT | 1809 |
| Esrrg | GGGATATTAAGGCAGGATGC | 1810 |
| Esrrg | GAAGAGGGTTGAAGGTAAAC | 1811 |
| Esrrg | GACAAAGGTCTAAGGAGTAT | 1812 |
| Esrrg | GAGCGATTGTAAATGTGTGA | 1813 |
| Esrrg | GTGAATGCGTGCAATGAGCT | 1814 |
| Esrrg | GGTAAGACTTCAAATGCAGG | 1815 |
| Esrrg | GGGAGGGCGGGAAGTTGTTA | 1816 |
| Esrrg | GCCAACTCACGAGCCAGGAA | 1817 |
| Esrrg | GAAGACTTGCAGGAAGAGTG | 1818 |
| Esx1 | GTGGGACTACACTGTAGGGT | 1819 |
| Esx1 | GGAAACACTCCTATTTCTAA | 1820 |
| Esx1 | GACATTTGAATTGGCTTCTT | 1821 |
| Esx1 | GTAGTCCCACCCATTCCGAA | 1822 |
| Esx1 | GGCATAAAGGGTTTCTTGCA | 1823 |
| Esx1 | GAAGAAGCCACGGAAACCAA | 1824 |
| Esx1 | GGAGTGTTTCCATTCGGAAT | 1825 |
| Esx1 | GGGTGGGACTACATTGTAGG | 1826 |
| Esx1 | GTCTTGCCCAACCATTCCAC | 1827 |
| Esx1 | GTCTAGGCAGGAACCCTCGC | 1828 |
| Esx1 | GCCAGATAACAAGATGAGTG | 1829 |
| Esx1 | GAGCTGCCCTTTGTTTCTTA | 1830 |
| Esx1 | GTGAGGAAATCCCTGTATAA | 1831 |
| Esx1 | GACGGACTTTCCCGAGACTG | 1832 |
| Esx1 | GAGTGTCAATCTCTGGGTCT | 1833 |
| Esx1 | GCAAGAGTCACCTTTATACA | 1834 |
| Ets2 | GCCAGGCTAGGCTTTAACTC | 1835 |
| Ets2 | GGCACTTGGGTTGGGTGGTT | 1836 |
| Ets2 | GTTGGGTGGTTAGGCTTCTG | 1837 |
| Ets2 | GCTCAAAGGCTCTATCTTGG | 1838 |
| Ets2 | GGCTGAGAACTTGGTAGGGA | 1839 |
| Ets2 | GCCCTTTGAACCCAGAGGGT | 1840 |
| Ets2 | GTGGGCCAACCACAAAGCAG | 1841 |
| Ets2 | GTTCGGGCGTTATGCCCAGG | 1842 |
| Ets2 | GCAGGGCTGAGAACTTGGTA | 1843 |
| Ets2 | GGCAAGCTCAGGCAAGGCCA | 1844 |
| Etv1 | GGAGCCGAAAGGTGGAGTGG | 1845 |
| Etv1 | GGGTCAGCAATAAACAACAA | 1846 |
| Etv1 | GCAGGATTTATTGAGATACT | 1847 |
| Etv1 | GGACTTCTATCAACCTAGAG | 1848 |
| Etv1 | GGAGTGTTAGGACATGCTCT | 1849 |
| Etv1 | GAGAACGGGAGCCAAGAGAA | 1850 |
| Etv1 | GAGAGGTGGCGCTGGAAGAG | 1851 |
| Etv1 | GCCTTATCCGAATCACTCAA | 1852 |
| Etv1 | GAGTCAAATAGTTAACAGGT | 1853 |
| Etv1 | GAGCGAGAGATGCGAAGGGA | 1854 |
| Etv2 | GGACAAGATGGTGACATTTA | 1855 |
| Etv2 | GCATCAGCCTACGTCACAAT | 1856 |
| Etv2 | GTTGAGAAAGGAAAGTTCTA | 1857 |
| Etv2 | GGGTGACAGACAGCCAGATC | 1858 |
| Etv2 | GCCTGGAGGATGAATGAATT | 1859 |
| Etv2 | GGGTCAAGTTGCAGGGATGG | 1860 |
| Etv2 | GTTCGTGGCTCACCTCTGGC | 1861 |
| Etv2 | GTCTGAACTAGGAAGGACAG | 1862 |
| Etv2 | GCTCTGGGCTTATCTGCAAC | 1863 |
| Etv2 | GTGTCTGAACTAGGAAGGAC | 1864 |
| Etv4 | GGTCAGATTCTGGGTCTCCC | 1865 |
| Etv4 | GGAGGAACTCCGAGTCAGAC | 1866 |
| Etv4 | GTGACAAGCTGAGTTACCTC | 1867 |
| Etv4 | GAGGCGTGAGCTAACGCCAG | 1868 |
| Etv4 | GCCATCTTACTCCTTATGAT | 1869 |
| Etv4 | GGCTCAAACCGGCTTTCTCA | 1870 |
| Etv4 | GAACCCGTGGAGAAGCTGCC | 1871 |
| Etv4 | GGTCTCCATGAAGGTTCAGG | 1872 |
| Etv4 | GAAAGCTAAGAAAGACACCA | 1873 |
| Etv4 | GCCAGGGCTCTCCAGAGAAG | 1874 |
| Etv5 | GCAGGACGAGGAGTTGGAAG | 1875 |
| Etv5 | GTGTGAGTACGGGCTGCCCA | 1876 |
| Etv5 | GGTCAGCGAGTTTCTGTGTG | 1877 |
| Etv5 | GCAAGCAACACTGCTTCTCC | 1878 |
| Etv5 | GATAGCCACAGTATCATATG | 1879 |
| Etv5 | GGGATGAGAACAGGGAGGGA | 1880 |
| Etv5 | GACACAAGAAGAATGTCCCA | 1881 |
| Etv5 | GAGTCAGTGAAGCTCTTAAA | 1882 |
| Etv5 | GTGTTGCTTGCCAAAGGATC | 1883 |
| Etv6 | GAGTCTGGGAAACCCTCAGC | 1884 |
| Etv6 | GAACCAGGCTTGCTGGTCCT | 1885 |
| Etv6 | GGAGAAGGACATGTCAGGAA | 1886 |
| Etv6 | GAGAGATGAACCAGGCTTGC | 1887 |
| Etv6 | GGGAATACAGAGGTGAGTCT | 1888 |
| Etv6 | GTTCTTGGAGGGAACCTCCA | 1889 |
| Etv6 | GTCCAGTCACCTACGTCGGT | 1890 |
| Etv6 | GACCTGGGCCACGCACAGTA | 1891 |
| Etv6 | GGCATAGTGCATAGTGGCCC | 1892 |
| Etv6 | GGAAAGCCACCCTGTGGTAT | 1893 |
| Evx1 | GAGAGTGCTGGAGAAAGACA | 1894 |
| Evx1 | GGCAGGTGGGCCAGATTGAG | 1895 |
| Evx1 | GCGGCCAGTTCTTCGAGGAT | 1896 |
| Evx1 | GGTAGGGAGAGGTTCAAGTA | 1897 |
| Evx1 | GCATCGGCATAGGTAGGGAG | 1898 |
| Evx1 | GAACAGAATTGTGAGATCAA | 1899 |
| Evx1 | GCCCGGCTAGGAGGGATAGA | 1900 |
| Evx1 | GCAGCTGTGGGTAGATTGTG | 1901 |
| Evx1 | GAAGGTTATTTACTGAGCAG | 1902 |
| Evx1 | GACCCAGGAAGGAGACTAAA | 1903 |
| Evx2 | GAAATGCTATCCTCTGCTAA | 1904 |
| Evx2 | GGGCGCGTCAAGAATGTAAG | 1905 |
| Evx2 | GCTTGCCTGTAGAAATAAGT | 1906 |
| Evx2 | GGCCTGCCTTTAAATAAGAC | 1907 |
| Evx2 | GGTCTAGGCTAGGCTCCATG | 1908 |
| Evx2 | GTGTCTCAAGGCGGGAAGGA | 1909 |
| Evx2 | GCATCTGAGTCGGGCAGGGT | 1910 |
| Evx2 | GTAAGGGCCTAGGGTGGAGG | 1911 |
| Evx2 | GAAATCTTCCTAGGCCACTG | 1912 |
| Evx2 | GCTTTCTTGCTACGTGGCTG | 1913 |
| Ezh2 | GGTTCCTTTCGGCACCTTGG | 1914 |
| Ezh2 | GATAACTGAACAGGGAGTGG | 1915 |
| Ezh2 | GTTCGGCCCTCTGATTGGAC | 1916 |
| Ezh2 | GTATGAATACTAGCTTCTAA | 1917 |
| Ezh2 | GACACTGGTGGAAGTCATCC | 1918 |
| Ezh2 | GGCGACCAGATTTCTCTGAA | 1919 |
| Ezh2 | GAAAGCCATGGACAGGCAGG | 1920 |
| Ezh2 | GCAGCTCATTTCTAITCCTC | 1921 |
| Fev | GGATGATAGAGAAATTGTTG | 1922 |
| Fev | GCTCAGTCTGACAGGGATCT | 1923 |
| Fev | GAATCCTATGGAAACTGGGA | 1924 |
| Fev | GCATATATTGGCTGTGAGAC | 1925 |
| Fev | GCAGGGAGAAGAGTTCAGAG | 1926 |
| Fev | GATGGCTAGAAAGAGGGCTC | 1927 |
| Fev | GAGGGAGATGGCTAGAAAGA | 1928 |
| Fev | GCCAGACGAGACAGGAAACC | 1929 |
| Fev | GACTCTCA6CAAACATCGGT | 1930 |
| Fgf3 | GTTCAACGGCTACATCCTGT | 1931 |
| Fgf3 | GGATAGACCACTCCCACTTA | 1932 |
| Fgf3 | GCAGAGACAGAAATAAAGGT | 1933 |
| Fgf3 | GACTGCTTAAGATTTCTCAG | 1934 |
| Fgf3 | GGATTCATTTGTGACATCTT | 1935 |
| Fgf3 | GCATCCTTCATTTGAGTCCC | 1936 |
| Fgf3 | GTCACAGAGCCTTAGAGCCC | 1937 |
| Fgf3 | GGCAGAGACA6AAATAAAGG | 1938 |
| Fgf3 | GAAGGACCACACCAGGGTGC | 1939 |
| Fgf3 | GCCAGGCACAGGAAGGTAAC | 1940 |
| Figla | GGAAATATTTGCATGCATTC | 1941 |
| Figla | GGAACAAAGCCCGTAGACCA | 1942 |
| Figla | GGGCCAAATAAATAATGGAA | 1943 |
| Figla | GCTGCGACTTCTTACTTTCC | 1944 |
| Figla | GGCTGAGGGTGTGACTGCTG | 1945 |
| Figla | GTTGAGATCATTTCCTCACA | 1946 |
| Figla | GGACTCTAGGACAGGAAGAG | 1947 |
| Figla | GGCATCTGAAACCAGGAGGA | 1948 |
| Figla | GCACGTGTGCAGCCTGAACA | 1949 |
| Figla | GACTTAACCTGACTCACCTG | 1950 |
| Fli1 | GTAAACCGAGTCTCAATTGC | 1951 |
| Fli1 | GGAAAGAGGCCAGAGGCGTT | 1952 |
| Fli1 | GCTGCCATTCCTGAGCTGCA | 1953 |
| Fli1 | GGCGTTTGGCTTTGGATTTG | 1954 |
| Fli1 | GGTGGTAACCACATTAAACA | 1955 |
| Fli1 | GCTGGCCAGGAACAATGACG | 1956 |
| Fli1 | GAGGGTCTCCTTCCAGGCAC | 1957 |
| Fli1 | GAAGGGAAGAGCAAGAGGGC | 1958 |
| Fli1 | GCTTAACCCTTTCCTGCCTG | 1959 |
| Fli1 | GAGGGTGTGCACCACTGTGT | 1960 |
| Fos | GGATGGACTTCCTACGTCAC | 1961 |
| Fos | GATCTAAGGATGGAGTAGCA | 1962 |
| Fos | GCAGTTATGAGTGGAAGGCA | 1963 |
| Fos | GAGGGTTCAAGACAGGACTC | 1964 |
| Fos | GAGAGGATTAGGACAGCGGA | 1965 |
| Fos | GGCCGGTCCCTGTTGTTCTG | 1966 |
| Fos | GAAAGATGTATGCCAAGACG | 1967 |
| Fos | GATCCAAACCCAGCGGGAGC | 1968 |
| Fos | GTAAAGGAO6GAGGGATTGA | 1969 |
| Fosb | GGTGAGTCTTCAGGCTTTGA | 1970 |
| Fosb | GAATCCGTGACAAAGCTAGT | 1971 |
| Fosb | GTCACGGATTCTGTGTGACT | 1972 |
| Fosb | GTCTCCTGAGCTAAGTGGGA | 1973 |
| Fosb | GATATCTCCAGGTGTAGGGA | 1974 |
| Fosb | GAGTTGCACCTTCTCCAACC | 1975 |
| Fosb | GCGGGAAGGGAGAGTTTGGG | 1976 |
| Fosb | GTATAAGCAGACCTGGGATC | 1977 |
| Fosl1 | GTTCCCAATGAAGACAGCCC | 1978 |
| Fosl1 | GGAGTGTGTGTACGTGAcTT | 1979 |
| Fosl1 | GCTTTAATCCAGGCCTCTAC | 1980 |
| Fosl1 | GCTCTCTGCCTGTAGAGGCC | 1981 |
| Fos11 | GAGAGGAGCGGTCTTAAGTC | 1982 |
| Fosl1 | GAGCATCACCTCCTGCTCCC | 1983 |
| Fosl1 | GAGCGCCTACAGAAGGACAT | 1984 |
| Fosl1 | GCTTGTGATAGCTCCAGAGA | 1985 |
| Fosl1 | GCTGTCTTCATTGGGAACAA | 1986 |
| Fosl1 | GTCCTGAGACACAGTCAGTA | 1987 |
| Fosl2 | GGTAATCCCAAACAGTACTA | 1988 |
| Fosl2 | GTACAGATAAGCGCTGTACC | 1989 |
| Fosl2 | GGGCTGGAGAATAAAGAGTG | 1990 |
| Fosl2 | GGAAACGCAGGCGCTTTATA | 1991 |
| Fosl2 | GCGCCCTTGGTCTGTTCCAT | 1992 |
| Fosl2 | GCCTGAGTTTCCCGGCGACT | 1993 |
| Fosl2 | GGATACAGATGCACTGCATA | 1994 |
| Fosl2 | GTACACGCACGCACCAGCCT | 1995 |
| Fosl2 | GAGTCGCCGGGAAACTCAGG | 1996 |
| Foxa1 | GCACGGAGTGTGTGTGTGTT | 1997 |
| Foxa1 | GGAGTGACTTCTAGTCACAG | 1998 |
| Foxa1 | GTACGTTCCCGCAATGCCGG | 1999 |
| roxa1 | GCCCTGTCTTCTATGTCATA | 2000 |
| Foxa1 | GCCTTCACTTTCTGCTTAGT | 2001 |
| Foxa1 | GCTTAGTTGGTACCCAGATA | 2002 |
| Foxa1 | GGGTCAAGAATCAGGATGAG | 2003 |
| Foxa1 | GCAGGAACAAGGAAGCTTCT | 2004 |
| Foxa1 | GCAGATGCGTTCCAGCACCC | 2005 |
| Foxa1 | GATCAGTAGGAGAGCAGAGA | 2006 |
| Foxa2 | GAAGTAGTGCTGGCGGCAAT | 2007 |
| Foxa2 | GAAATAGTTGGCCCAAATCC | 2008 |
| Foxa2 | GTTTAGCTGCAGCCAATACC | 2009 |
| Foxa2 | GTGTGAGCTGATTATTCAAA | 2010 |
| Foxa2 | GGCTGGTCACTGAATGCCAG | 2011 |
| Foxa2 | GACCCATTTGAGTAGAAGGA | 2012 |
| Foxa2 | GAATTGCACAGCGTTAAGCA | 2013 |
| Foxa2 | GGAGCACTTGGGTGGAGATG | 2014 |
| Foxa2 | GATTATTCAAATGGGCTGCC | 2015 |
| Foxa3 | GTGTGGTCGAACTTGTTATT | 2016 |
| Foxa3 | GATCCACTCTTTAGGATAAC | 2017 |
| Foxa3 | GGTGGAGGAGGAGGAGGTGA | 2018 |
| Foxa3 | GCTCCCGCTCTGTTGCTCTA | 2019 |
| Foxa3 | GGAAGGAGGGAGGCAAACGG | 2020 |
| Foxa3 | GCTCCGTACAGAGTCAGGGT | 2021 |
| Foxa3 | GGAAACGTGCTGTTATCCTT | 2022 |
| Foxa3 | GAAGCCAAAGAAGGCAAGGA | 2023 |
| Foxa3 | GCGGATTTGAGGAAGGAGGG | 2024 |
| Foxa3 | GCTTCGCACACGGCCAGTCT | 2025 |
| Foxb1 | GATAGATATATTTGGACAGC | 2026 |
| Foxb1 | GTATTTAACCTAGTGGCATG | 2027 |
| Foxb1 | GTATCTTACTGGTTGCCATT | 2028 |
| Foxb1 | GAAAGAAACCAGCGCTGGCC | 2029 |
| Foxb1 | GAAGCATTGACCCGTCTCTG | 2030 |
| Foxb1 | GATTGGATGGGTTGTTCAAA | 2031 |
| Foxb1 | GCAATCGCGGCTTTAAGCCA | 2032 |
| Foxb1 | GGTCCAACTGATTTAATCTT | 2033 |
| Foxb1 | GAAGCTTGGTGGAGGTGGGA | 2034 |
| Foxb2 | GGTCTGCTGTTCCACAGCAA | 2035 |
| Foxb2 | GGTGTATCCTCTTGTTTCTT | 2036 |
| Foxb2 | GGATGACTAGACTTGAGCTC | 2037 |
| Foxb2 | GACCAGTGGAAATGGAGAAG | 2038 |
| Foxb2 | GCCTCTCAGCTGTAAGGTTT | 2039 |
| Foxb2 | GGGAAGTGAAAGCGAAGGGT | 2040 |
| Foxb2 | GGCTGCAGCTGCAGCTCAGA | 2041 |
| Foxb2 | GGAGCCAGAAGGTTCCCTGC | 2042 |
| Foxb2 | GCCAAACAGCAGGAGCCAGA | 2043 |
| Foxb2 | GGGCGTCCTAGGAATTCCTC | 2044 |
| Foxc1 | GACGGCAAAGTGATTGCCCG | 2045 |
| Foxc1 | GAGTCTGGGAGTGAGTGGGT | 2046 |
| Foxc1 | GGAAAGGAGAGGACAAGGGA | 2047 |
| Foxc1 | GTGGTGACACCACAGGAATG | 2048 |
| Foxc1 | GAGGGATATTCGGAAAGGAG | 2049 |
| Foxc1 | GCGGTATTGGAGGATCTGAG | 2050 |
| Foxc1 | GAACGTGAAGATGCAGTCTT | 2051 |
| Foxc1 | GTGTGTTAGTGAGGGAAAGA | 2052 |
| Foxc1 | GTTTCCACATTCCAGCGGGC | 2053 |
| Foxc2 | GAGTCGCTGTGCGTCAAGGT | 2054 |
| Foxc2 | GAGGGAAGGAGCACGCTTGA | 2055 |
| Foxc2 | GAGTCCTCCAAACAATTTCG | 2056 |
| Foxc2 | GAAAGCGCTGTCTGGAGGTT | 2057 |
| Foxc2 | GGTTTAAATTTGGCATACGC | 2058 |
| Foxc2 | GGCTGGGAGGGAAGGCTTAG | 2059 |
| Foxc2 | GTCCGGTGTAGATCTGGGTA | 2060 |
| Foxc2 | GAGATCTGGCTAAGAGCATC | 2061 |
| Foxc2 | GCTGGGAGGGAAGGCTTAGT | 2062 |
| Foxc2 | GTGGGAATGCCAAACTGGGA | 2063 |
| Foxd1 | GATCTAGTAGTCTCCTCTGA | 2064 |
| Foxd1 | GAGAAAGTTCACCCGCAGGA | 2065 |
| Foxd1 | GATCAATGAAGGTACAGAAC | 2066 |
| Foxd1 | GATTCTGAGAGCTAGGGACC | 2067 |
| Foxd1 | GGAGAAGAAGCCTGTTGTGC | 2068 |
| Foxd1 | GCTTTCAGGCCAAGGAGTGG | 2069 |
| Foxd1 | GGTAGGGTGTCCCAGCTCTC | 2070 |
| Foxd1 | GCAGACAGGCGTCCTAACCA | 2071 |
| Foxd1 | GGGCCTGTGACAAAGATGAA | 2072 |
| Foxd1 | GAAACAGCCCTTTAACCCTT | 2073 |
| Foxd2 | GGAGTGCACAGCAGGTATTG | 2074 |
| Foxd2 | GGGATGAGGTTAAGTTTCTT | 2075 |
| Foxd2 | GTGGCCAAGGCTCCAGCATA | 2076 |
| Foxd2 | GCAACACTGGCCCAGGGATG | 2077 |
| Foxd2 | GCGGTGCACACCAGGAAAGT | 2078 |
| Foxd2 | GCCAGAACATTCCACTTCCA | 2079 |
| Foxd2 | GCCCTATTCTCTGGGAGGGA | 2080 |
| Foxd2 | GGGTGCCCTATTCTCTGGGA | 2081 |
| Foxd2 | GCCTAAGGCGGAAGAACTGT | 2082 |
| Foxd2 | GCCACTGTGAGGCGCTGTTG | 2083 |
| Foxd3 | GACTTTGTCCGCCTCGTTGA | 2084 |
| Foxd3 | GCTGGAAACGGAGCAGGCAT | 2085 |
| Foxd3 | GTTATGACGTCTTTGTTTAT | 2086 |
| Foxd3 | GGGAAATCCCAGAGATGCTG | 2087 |
| Foxd3 | GGGCTCCAAGCAGCTCTGGA | 2088 |
| Foxd3 | GTTCAGGGAATTGTCAACAA | 2089 |
| Foxd3 | GCGGTCTTGGGTAAGTGGAG | 2090 |
| Foxd3 | GGCTTAATATCGATTTCTAG | 2091 |
| Foxd3 | GCTGACTAGACAGTCTTCTC | 2092 |
| Foxd4 | GCTGGCCTCTGACCTCTACA | 2093 |
| Foxd4 | GAACTTCCACAGTTTATGCT | 2094 |
| Foxd4 | GTAGTTGGTAAAGACAACGA | 2095 |
| Foxd4 | GGAACCGAGTCTCTCCAGCA | 2096 |
| Foxd4 | GAGGGAAGGAGCCATTTCTC | 2097 |
| Foxd4 | GCAGTGTGGATGCCTTACCA | 2098 |
| Foxd4 | GAACCGAGTCTCTCCAGCAG | 2099 |
| Foge1 | GCCAGTACCTTTCCTGAGCA | 2100 |
| Foxe1 | GGGTAAGAACTGGACTAAAG | 2101 |
| Foxe1 | GTCTACAGCTGAAGACGACG | 2102 |
| Foge1 | GGTGGAAGGTACAACCCAAG | 2103 |
| Foxe1 | GAATTCTGCTTCCCTCTGCT | 2104 |
| Foge1 | GAAAGCCTCCTCGCCGCATC | 2105 |
| Foxe1 | GAAGCAGAATTCTGGAAGAA | 2106 |
| Foxe1 | GCCGCATCAGGGTCCTTAGG | 2107 |
| Foxe1 | GTTTGCTGGCGCCTTTAAGG | 2108 |
| Foxe1 | GGAAAGAGACACACTGTGGA | 2109 |
| Foxe3 | GCTAGCAAAGACTGCTGGAG | 2110 |
| Foxe3 | GAGCGGGAACTAGAAGCATG | 2111 |
| Doxe3 | GCATCCTATGTAGCTGGTCA | 2112 |
| Foxe3 | GGGATGGTACTTACTGAGAC | 2113 |
| Foxe3 | GGGCTGGGAAAGCAAATTAG | 2114 |
| Foxe3 | GGGAAAGCAAATTAGAGGGC | 2115 |
| Foxe3 | GAGGAAAGCGAGAAAGGCTA | 2116 |
| Foxe3 | GGACAGTTACACACAGGGAA | 2117 |
| Foxe3 | GACTGACTCAGGGATGAGGG | 2118 |
| Foxe3 | GACCCAGAGGGACTAGACCA | 2119 |
| Foxf1 | GCGGATTTCAGAGTTAAGCG | 2120 |
| Foxf1 | GCAAGCCTGCGCGTCTAAGT | 2121 |
| Foxf1 | GGACAGACTTTAGAACTCTG | 2122 |
| Foxf1 | GAGCCCACTGAATAGCTACG | 2123 |
| Foxf1 | GGTGATTAGAGGATTCGCTT | 2124 |
| Foxf1 | GAGCCACAGGATCACAAGAA | 2125 |
| roxf1 | GGGTGTGGGAATGTGTGGCC | 2126 |
| Foxf1 | GGCACATCTGTGCGAGGGTC | 2127 |
| Foxf1 | GTCTGTCCTGGAGAAAGGAA | 2128 |
| Foxf1 | GACCCTCGCACAGATGTGCC | 2129 |
| Foxf2 | GGCACGGATCGCTAGGTTGG | 2130 |
| roxf2 | GGGCACGGATCGCTAGGTTG | 2131 |
| Foxf2 | GGGTCTGAGGAACAGAGGAA | 2132 |
| Foxf2 | GGGATCAGCATGAAATAAAT | 2133 |
| Foxf2 | GGAGCTTTGTGGGCAGACTT | 2134 |
| Foxf2 | GGAGTAATCGAGTCTGGCCA | 2135 |
| Foxf2 | GCTCAGAGAGAGATGGCCCT | 2136 |
| Foxf2 | GCCTGGGAAGATGGGAGACA | 2137 |
| Foxf2 | GTTGACAGATGGTGTCAGTT | 2138 |
| Foxg1 | GAATGCGAGTCTCTCAAAGC | 2139 |
| Foxg1 | GCTTTATGTGCAGAGGGAAG | 2140 |
| Foxg1 | GCCCAGCATTTCCCAGGGAT | 2141 |
| Foxg1 | GATTACCTTCAGAAGACAGA | 2142 |
| Foxg1 | GTGAAATGATTCGGTGTAAC | 2143 |
| Foxg1 | GTAGGAAGAGATCCAAGCAG | 2144 |
| Foxg1 | GCGCGCCACGTTGTAAGCAG | 2145 |
| Foxg1 | GCTAGAGAGATCTGTGAGCC | 2146 |
| Foxg1 | GGTGCCAAAGGTTGATTTCT | 2147 |
| Foxg1 | GCTCACAGATCTCTCTAGCT | 2148 |
| Foxh1 | GTGAGGGTCGGGTCTATCTG | 2149 |
| Foxh1 | GACTTTCCTGTGCTTCATGT | 2150 |
| Foxh1 | GCTTTAACTGGAACCAAGGA | 2151 |
| Foxhl | GTCATCCACTGTAGATTGAC | 2152 |
| Foxh1 | GTCATGGTGATGGGACTTTC | 2153 |
| Foxh1 | GAGGTTCCAGGIGAGAAGGC | 2154 |
| Foxh1 | GGTACAGTCATGAGTGGAGG | 2155 |
| Foxh1 | GCAGCAGTTTGGGTGATGGT | 2156 |
| Foxh1 | GGAGTCTGCTCAGGACTTGA | 2157 |
| Foxh1 | GATGGATTTGCCCGACCAAC | 2158 |
| Foxi1 | GCTTACTTACTTTGAACCTC | 2159 |
| Foxi1 | GGCAAATGAAAGCAATTCTG | 2160 |
| Foxi1 | GAGCATGTGTCAGTGCCTGG | 2161 |
| Foxi1 | GGATAAGCCACCTTTAAGCT | 2162 |
| Foxi1 | GTGACCTGGCACAACTGTCC | 2163 |
| Foxi1 | GAAGATGATGGCACCAAGAG | 2164 |
| Foxi1 | GTAAAGCAGAGAGAGAGGTT | 2165 |
| Foxi1 | GCCTAGCTCCCTCAGTGCCA | 2166 |
| Foxh1 | GAAATCGTCCTTGCTGAGGG | 2167 |
| Foxh1 | GACTCAGGAGAAGAAAGTAG | 2168 |
| Foxi2 | GTTAACGAGGCAGTATGACA | 2169 |
| Foxi2 | GTGCCTAAGGCAAGGGCATC | 2170 |
| Foxi2 | GAGTTCCAAGACTGTTTGTC | 2171 |
| Foxi2 | GACCTGTTTGTCATGTAGCC | 2172 |
| Foxi2 | GGTTACAGCTGTGGCACAGA | 2173 |
| Foxi2 | GCCCAGGCTACATGACAAAC | 2174 |
| Foxi2 | GGTTGGTTAAGTAAAGGCAG | 2175 |
| Foxi2 | GTCCAATCTGGCCTGGCTTC | 2176 |
| Foxi2 | GAGAGAGAGGCTGGTGGCTT | 2177 |
| Foxi2 | GAGAGCAGAGCCTTAGGAGC | 2178 |
| Foxi2 | GGCCACTTCCCTGCAGTGCT | 2179 |
| Foxj1 | GGGAAGCAGGGTGTTCAGAA | 2180 |
| Foxj1 | GAATGAGCAAGGCAGAGCAA | 2181 |
| Foxj1 | GAGACTTGGTCTGCAGAATC | 2182 |
| Foxj1 | GGGCAAAGACTTCAAGGGCA | 2183 |
| FoKj1 | GGCAGATGCAGAAGCAGGTA | 2184 |
| Foxj1 | GGCAACTCTCTGGAACTCTC | 2185 |
| Foxj1 | GGGAGGAATGCACTAGGGTA | 2186 |
| Foxj1 | GCTTCCAACCAATAGTTCGG | 2187 |
| Foxj1 | GACTTGGTCTGCAGAATCCG | 2188 |
| Foxj2 | GCTGTCTGGAAGAGAAAGAG | 2189 |
| Foxj2 | GTCAGTGAAAGATTGGATCG | 2190 |
| Foxj2 | GTAGTGAGACCTGAAGGACC | 2191 |
| Foxj2 | GATGCCAGCGTCCACGCTAA | 2192 |
| Foxj2 | GGAAGGGTAGTGAGACCTGA | 2193 |
| Foxj2 | GTCACTTGACTTTAGCACAA | 2194 |
| Foxj2 | GGTCTCACTCCGGGTCCTTC | 2195 |
| Foxj2 | GGGAGGGAAGAGGCTTTGTT | 2196 |
| Foxj2 | GAGAAAGGGAGCCATGCCTG | 2197 |
| Foxj2 | GGTCCTGGCTTGTGCGTATC | 2198 |
| Foxk1 | GACACAGACCTTCCAGTGCT | 2199 |
| Foxk1 | GATGAATCCAAGCACCCTTC | 2200 |
| Foxk1 | GGTGGAGCAATTGAGCACAC | 2201 |
| Foxk1 | GGGAATTAGCATCCCAGTGC | 2202 |
| Foxk1 | GAGGCTGGAGTTTAAAGTCC | 2203 |
| Foxk1 | GCACTGGAAGGTCTGTGTCT | 2204 |
| Foxk1 | GCTGACGGCCAAGTGIGGGA | 2205 |
| Foxk1 | GAGGGTGAGCTGGCACAGGT | 2206 |
| Foxl1 | GAGGCAGGATGTGGAGGGAC | 2207 |
| Foxl1 | GAAACACACTCCGACCCTCT | 2208 |
| Foxl1 | GAACAGAGACTGCCTCCTCA | 2209 |
| Foxl1 | GTTGAAGTCACAGAGGAAAG | 2210 |
| Foxl1 | GAATCTACAGCGGAATGTGG | 2211 |
| Foxkl1 | GGTTGGACACTTAAGGAATC | 2212 |
| Foxkl1 | GCACCGCCCACTTTAGTCGT | 2213 |
| Foxkl1 | GTGGGTGGGTGTGTGTGTGG | 2214 |
| Foxl2 | GCAGAGCCTCTAACTTCTGC | 2215 |
| Foxl2 | GACTTCTTGCTGTCCTTTGC | 2216 |
| Foxl2 | GATGAGACCCAGGGTCAGCT | 2217 |
| Foxl2 | GGTGGAGTGGCCGAACTTTG | 2218 |
| Foxl2 | GAGAGGTGATCCAAGCCTCT | 2219 |
| Foxl2 | GCATCTTCTCCTTCCAGCAT | 2220 |
| Foxl2 | GCTTCCCACTTTGAGATGAA | 2221 |
| Foxl2 | GCACAAGTGTCACGCGTGGA | 2222 |
| Foxl2 | GAAGTCAGCCTCTGGCCATC | 2223 |
| Foxl2 | GAAGGAGAAGATGCAGGTAA | 2224 |
| Foxm1 | GTTGAGTGTGGAGAATAATG | 2225 |
| Foxm1 | GCCTTCTAGTACACAATGGC | 2226 |
| Foxm1 | GCCACGTAACCGCAAGTCTA | 2227 |
| Foxm1 | GTATGAAGAGAGCTGCAGGG | 2228 |
| Foxm1 | GCAAGICACTTGCAATGACT | 2229 |
| Foxm1 | GCCAAGGCGTTGTCACAGAA | 2230 |
| Foxm1 | GGGAAGAAGGTCTGAGCCTC | 2231 |
| Foxm1 | GAAGAGAGCTGCAGGGTGGA | 2232 |
| Foxm1 | GCAAGCTTTGACCCTGAGGA | 2233 |
| Foxn1 | GACATGGGAGGGAAGTCACA | 2234 |
| Foxn1 | GCAGGCATGCCCACAGACAT | 2235 |
| Foxn1 | GTTAACCATCGTGTACAGAT | 2236 |
| Foxn1 | GGGTTCTGGGAAGCAGCACA | 2237 |
| Foxn1 | GAGGGAAGTCACATGGATTT | 2238 |
| Foxn1 | GTGCATGTCCCAACAGGCCT | 2239 |
| Foxn1 | GCTACACACTGCCACACATA | 2240 |
| Foxn1 | GGAGACACAAGCCTGAGTAC | 2241 |
| Foxn1 | GAGTCAATTCACCGTTCTCT | 2242 |
| Foxnl | GGACATGCTGTGTATGGATG | 2243 |
| Foxn2 | GGAGATTCTTGTATACCAAG | 2244 |
| Foxn2 | GTATTGCCTACACTGTATTG | 2245 |
| Foxn2 | GGTCTGGGTGTGGTCAGTCA | 2246 |
| Foxn2 | GCTTCATTTGGTTCCTGATG | 2247 |
| Foxn2 | GCTTTGTTGAGCAAGCAGAC | 2248 |
| Foxn2 | GGTGTGGTCAGTCACGGCAG | 2249 |
| Foxn2 | GCTCCACTTAGTTCAAAGTC | 2250 |
| Foxn2 | GGCAACAGTGATGCTATGTA | 2251 |
| Foxn2 | GACAAAGGTGCCCAGGCTTG | 2252 |
| Foxn2 | GCCCGGAAGGACCTATGGGA | 2253 |
| Foxn4 | GCCACGGTCGCATGTTGAAG | 2254 |
| Foxn4 | GCAGTGCATGACCCAGCCAG | 2255 |
| Foxn4 | GACCGGTTTACGTATTACTC | 2256 |
| roxn4 | GAGTTGGACAGCTCCAGAGA | 2257 |
| Foxn4 | GTGCAGTGCATGACCCAGCC | 2258 |
| Foxn4 | GAAGCAACGGGCTCTTTCTG | 2259 |
| Foxc8 | GCGAGCTCGGGAGACGAAAG | 2260 |
| Foxn4 | GATCAATCCTGTTAGGGAAC | 2261 |
| Foxn4 | GCCTGAACTTAAGGGTTCCC | 2262 |
| Foxo1 | GGTTCAGGATGAGTGGAGGC | 2263 |
| Foxo1 | GAAGACTTCACTCATCTTGG | 2264 |
| Foxo1 | GAGGCGGCAGTAGGTTGGTG | 2265 |
| Foxo1 | GCACCTTAAACGGTTCATAG | 2266 |
| Foxo1 | GGTGAAGACCCGTCGCTCTG | 2267 |
| Foxo1 | GTCCTCGGCACCTCTGGTTC | 2268 |
| Foxo1 | GCAGGTGTGCACAGGTAGGG | 2269 |
| Foxo1 | GACGTCACTGAGCATCTTAC | 2270 |
| Foxo1 | GCGAAGGCCAAATTCACAGC | 2271 |
| Foxo3 | GTCTGGAGCCCAGAGACTGG | 2272 |
| Foxo3 | GGGAGGAGGGAAAGGAGGTA | 2273 |
| Foxo3 | GTGCACACACCTGGACCACA | 2274 |
| Foxo3 | GCGTCGAACTAGCTTGGTGC | 2275 |
| Foxo3 | GGCAATATAGATGGTGATGT | 2276 |
| Foxo3 | GCATTCTGACCCTGAAGGTA | 2277 |
| Foxo3 | GAAGAGGAGCGAGAGGCGTC | 2278 |
| Foxo3 | GAGGCACGGATCGTGGGATA | 2279 |
| Foxo3 | GACAGCGGGAGGACTAGAGG | 2280 |
| Foxo4 | GAAGTAGCAAGTTACAGAAG | 2281 |
| Foxo4 | GGGATTCAGTTCTGGAGTTG | 2282 |
| Foxo4 | GTTTCCTCTGTCAGCTATGC | 2283 |
| Foxo4 | GTAGTCTTCGAGAACGACCA | 2284 |
| Foxo4 | GGTGGAACTTTAATGATTAG | 2285 |
| Foxo4 | GGTAAACAGAGACGTCTGGC | 2286 |
| Foxo4 | GGTCACTCTTGAGAGGGTCA | 2287 |
| Foxo4 | GTCTCTGTTTACCACTCGCT | 2288 |
| Foxo4 | GAAGGCCCAGTGTATGAAGA | 2289 |
| Foxp1 | GGGAAGGAATCACACCACCA | 2290 |
| Foxp1 | GCAGTGAGGGTTTCTAACCG | 2291 |
| Foxp1 | GGTGGCCTCTGGATCCGCAA | 2292 |
| Foxp1 | GACAGTCTTCTGAAGCAGGC | 2293 |
| Foxp1 | GTAATTTGTCTGTAGAACCC | 2294 |
| Foxp1 | GCAATTAAGAATTCACTCCA | 2295 |
| Foxp1 | GAAGGCTAGGAATCTTCTTC | 2296 |
| Foxp1 | GCTTTGGTGTTGATGACAGT | 2297 |
| Foxp1 | GTAGAGTAGTAGGGTCTCAG | 2298 |
| Foxp2 | GAGCTGCTGGCAAATGAAAC | 2299 |
| Foxp2 | GAAACTCTAACTGCTTGCTT | 2300 |
| Foxp2 | GTAGAGAAGAATGACTACAG | 2301 |
| Foxp2 | GACCACATACCTTGCCACGG | 2302 |
| Foxp2 | GGGTCTTGTGACTTGAATCT | 2303 |
| Foxp2 | GAGGACCCTGTCAGAATGAA | 2304 |
| Foxp2 | GTAGCCTAGCAGGGTTGGTG | 2305 |
| Foxp2 | GGCGCACACACAGGAGAGAA | 2306 |
| Foxp2 | GACCCTGTCAGAATGAAAGG | 2307 |
| Foxp2 | GAGAGAGGCGACTTGAGCAG | 2308 |
| Foxp3 | GGGTCTGTGGAAGCTGAGAC | 2309 |
| Foxp3 | GAGCAGGGACCATTAACTTT | 2310 |
| Foxp3 | GCTAAGGAAATACTGAGGTT | 2311 |
| Foxp3 | GAGAAGACAGACCCATGCTG | 2312 |
| Foxp3 | GGGATGAGGTCCTCTTACTT | 2313 |
| Foxp3 | GGCAGAGAGGTATTGAGGGT | 2314 |
| Foxp3 | GCCATTGACGTCATGGCGGC | 2315 |
| Foxp3 | GGCAACAAGGAGGAAGAGAA | 2316 |
| Foxp3 | GTAGCCTTTCTTTCCACAGA | 2317 |
| Foxp3 | GCCCAAGTGTACAGGGAGCA | 2318 |
| Foxp4 | GGAGGACTAAATTGGGTAGC | 2319 |
| Foxp4 | GGATGAACTGGGTAAGGACT | 2320 |
| Foxp4 | GAGCTTGTGTTTAGCACTTC | 2321 |
| Foxp4 | GGACCACGTGGACCAAACTT | 2322 |
| Foxp4 | GTAGCAATGAGAGACTGACT | 2323 |
| Foxp4 | GTTCCTTCCTTGCTCCCACA | 2324 |
| Foxp4 | GAGTTAATAAAGCCTCCCAT | 2325 |
| Foxp4 | GCCTCAATTAGGACAAGATG | 2326 |
| Foxp4 | GACTGAGTAGGCCTGAGTAG | 2327 |
| Foxp4 | GTGGGCCAGGAGCTGAAAGG | 2328 |
| Foxq1 | GAGAATTCATTCACCTTCTA | 2329 |
| Foxq1 | GGCCATAGAGAGGAAGTAAG | 2330 |
| Foxq1 | GGCCGAGGGACTGGTTGCAT | 2331 |
| Foxq1 | GACAAAGCATTGATTTGGCC | 2332 |
| Foxq1 | GATGGATTGATAAGTGCCTG | 2333 |
| Foxq1 | GCCTAACCAAGATCAAGGTA | 2334 |
| Foxq1 | GCACGGGTGTCAAACAGGAA | 2335 |
| Foxq1 | GAAGCCGGCTAAGAAACAAG | 2336 |
| Foxq1 | GAAGCTGGCGTGGTAGGCAT | 2337 |
| Foxs1 | GCTGCCCTGAGCCTGAGCTT | 2338 |
| Foxs1 | GTTCTGTCCTCAGGGCAGAC | 2339 |
| Foxs1 | GTACTGGGAGTTCTGTGAAC | 2340 |
| Foxs1 | GTACCAGCACCAATACCTAG | 2341 |
| Foxs1 | GCCTGAATAGTATAGCCCGG | 2342 |
| Foxs1 | GAAGGAAAGAGAGAGAGAGA | 2343 |
| Foxs1 | GAGAGTGGGAGACACAGCAG | 2344 |
| Foxs1 | GTAGACTTTGGAGGGCTACA | 2345 |
| Foxs1 | GATAGTTGTGTGGAGATGGG | 2346 |
| Gab1 | GAGTTGACTGATGTGATGCT | 2347 |
| Gab1 | GGTAGAACAGCTCCTGGGTC | 2348 |
| Gab1 | GGAGAATTCACCCTTCAAGA | 2349 |
| Gab1 | GTTCCTCTCTGGCTGCCTCG | 2350 |
| Gab1 | GTGTGTTTGAAACAAAGCCT | 2351 |
| Gab1 | GCTTGAGTGAGTTCTCCTCC | 2352 |
| Gab1 | GACCTCTTCCTTAAAGCATA | 2353 |
| Gab2 | GCTGGCTATTAATTCCTCTT | 2354 |
| Gab2 | GAGTTAACTTACAGTGAAGC | 2355 |
| Gab2 | GTAGATCAAAGGGTGCTTGG | 2356 |
| Gab2 | GCTTCGCTAGATTGTAATTT | 2357 |
| Gab2 | GAGGATTTGTGGCCAGCAGC | 2358 |
| Gab2 | GCGCTCTCCCATAGTGCCTC | 2359 |
| Gab2 | GCCATCTCCTCCACAAAGCC | 2360 |
| Gab2 | GGACTCATTTCAGCCAGAAT | 2361 |
| Gab2 | GCATGTCCTTGCAGGGCTTA | 2362 |
| Gab2 | GAGTGTGGCTTTGAATGTTA | 2363 |
| Gabpa | GATGGCGGAGTCTTAGCTGA | 2364 |
| Gabpa | GCCTCCTGGGACTGAGCTTC | 2365 |
| Gabpa | GGGTTGTGTGGCCTTTATCA | 2366 |
| Gabpa | GGATATCATAGAAGTGCGGT | 2367 |
| Gabpa | GCTGTGCTACAGTGCTTACG | 2368 |
| Gabpa | GAGTACGCTAAATTAGACGT | 2369 |
| Gabpa | GCGATCTGTTCATGATCACA | 2370 |
| Gabpa | GACAGAAGCCAAACAGGAGG | 2371 |
| Gabpa | GGACTCAGTGCAAGGTGACT | 2372 |
| Gabpa | GGTTTCTTCACGAGGAGAGA | 2373 |
| Gabpb1 | GAGACAACCGAGAATAACCT | 2374 |
| Gabpb1 | GGCCAGTAGGCTGATGTCTA | 2375 |
| Gabpb1 | GCAAAGGGAGAGGACTGCTA | 2376 |
| Gabpb1 | GTTCATTCCTTCAGCAGTGC | 2377 |
| Gabpb1 | GGTGAAGGCCATCCAGTCGA | 2378 |
| Gabpb1 | GTACCCGGAATCGCTGGTTG | 2379 |
| Gabpb1 | GGCATGGAGAAGCAGTAGTT | 2380 |
| Gabpb1 | GTTAGGTTTGGTTGGTTGGT | 2381 |
| Gabpbl | GATTTAACTTACCGTGGTCC | 2382 |
| Gata1 | GTGTATCTGAAGTTTGTTAC | 2383 |
| Gata1 | GAGGGCTAAATATAATCCCA | 2384 |
| Gata1 | GTCAGTCGGACCACTTAACA | 2385 |
| Gata1 | GTGATCTTATCCCAATCCTC | 2386 |
| Gata1 | GCCCTGGAAATCCGTAGGCT | 2387 |
| Gata1 | GCAAGGGTGAGAATTGGAGG | 2388 |
| Gata1 | GTGCCATTGGTGTGAGGATG | 2389 |
| Gata1 | GCCTAGCCTACGGATTTCCA | 2390 |
| Gata1 | GTGGAGGGACAATGGCTGGT | 2391 |
| Gata1 | GATCCTGATACTAATAGCAG | 2392 |
| Gata2 | GCAGTATGAGGCCCAGAACT | 2393 |
| Gata2 | GCGTCTGATGCGGGTCTGCT | 2394 |
| Gata2 | GTTCTTTGAATTTCTCAGAG | 2395 |
| Gata2 | GAGGTTCCTAAGATACCTTC | 2396 |
| Gata2 | GAATAACCGTTCTAATGAGG | 2397 |
| Gata2 | GACCACCAGGCTGAACTGCC | 2398 |
| Gata2 | GCTGAATAACCGTTCTAATG | 2399 |
| Gata2 | GTCGTCCGTAGCAGTGGAGG | 2400 |
| Gata2 | GGAGTCAGTTGGATTTGGGC | 2401 |
| Gata2 | GTCCGTAATTGGGTAACTGG | 2402 |
| Gata3 | GGTGCAGGGIGAACTCAGAA | 2403 |
| Gata3 | GGACGCCCGCGTTATTGTTA | 2404 |
| Gata3 | GGGCTTCCTCTTCCCTTGGC | 2405 |
| Gata3 | GTAGCAAAGCCGATTCATTC | 2406 |
| Gata3 | GGCACTGGATCCAGCCTGTA | 2407 |
| Gata3 | GGTCTGAGGTAGTTTAGGGT | 2408 |
| Gata3 | GCTTGGCTTTAGAGGGTTAC | 2409 |
| Gata3 | GTCTCTGGGACAGGGTCTGG | 2410 |
| Gata3 | GGGACACGATCCTCAGCACA | 2411 |
| Gata3 | GTTGCAGTTTCCTTGTGCTG | 2412 |
| Gata4 | GATTCTGACTGGCATTGTTT | 2413 |
| Gata4 | GCAGTCAGTCCTCGAACCTA | 2414 |
| Gata4 | GTCTCTAGGCACTGACCTTA | 2415 |
| Gata4 | GTTTCCAATACAAGATTAGA | 2416 |
| Gata4 | GAAAGCTACAGACTTAAGGC | 2417 |
| Gata4 | GGGAGGCCAAAGAGAGGAGG | 2418 |
| Gata4 | GAAGGAAAGCACTCAGTGCC | 2419 |
| Gata4 | GCACAGAGGTCGCCTAGTTC | 2420 |
| Gata4 | GCAACGCTGAGGATCAGACT | 2421 |
| Gata4 | GTGCCATCCCGAGCCTTCTC | 2422 |
| Gata5 | GATGGAGCTAGAAGGACCTA | 2423 |
| Gata5 | GTCAGTGCCCAGGTCTAGAC | 2424 |
| Gata5 | GGGAGCCTCAGCCAGTCTTT | 2425 |
| Gata5 | GTCCTCCAACTTGGCCACTC | 2426 |
| Gata5 | GCATTGACCAGTGGGCAGCA | 2427 |
| Gata5 | GGATTAAACTCAGTTCAGAT | 2428 |
| Gata5 | GGGTGCTGCAGACAGATACG | 2429 |
| Gata5 | GGACCGACTAGAAGAGAGAA | 2430 |
| Gata5 | GGGAGCTCGGAATAGACGTG | 2431 |
| Gata5 | GGGACCGACTAGAAGAGAGA | 2432 |
| Gata6 | GAAGGTGGCACACCAACCTA | 2433 |
| Gata6 | GATAACGCGTTGAGAAGGAG | 2434 |
| Gata6 | GTATATCACTGCTGCTGCCT | 2435 |
| Gata6 | GCTAAAGGACACCAAGGGAG | 2436 |
| Gata6 | GAACGGTTTATAGACCTACT | 2437 |
| Gata6 | GTTACAGCGCTGGATGATTA | 2438 |
| Gata6 | GGCGAGGTAGGGAATACACA | 2439 |
| Gata6 | GAGAAGGGAAATGACTTACT | 2440 |
| Gata6 | GTCAGTTACTAGCAACTGCG | 2441 |
| Gata6 | GACCTGAGCATCCCGAAACA | 2442 |
| Gbx1 | GCTTCCTCTCTCAAACACAG | 2443 |
| Gbx1 | GATTGATGAGGCCGGACCCG | 2444 |
| Gbx1 | GGACTCGGTTCTCTAAGCTC | 2445 |
| Gbx1 | GTAGCTAGTATCATGTGTTG | 2446 |
| Gbx1 | GAATACCTGCCCAATCAGAA | 2447 |
| Gbx1 | GACCTCACTGTAAATGGAGG | 2448 |
| Gbx1 | GAGGACAGAGCTGGGCTGAA | 2449 |
| Gbx1 | GGACAGTCAAGGCGGAATGG | 2450 |
| Gbx1 | GCTTTGTGAAAGTTTGCGGC | 2451 |
| Gbx1 | GAGCCAGGGAGATAGAGTGA | 2452 |
| Gbx2 | GATTGCGCCGAAAGGAAAGT | 2453 |
| Gbx2 | GCCTCTCATGAGGCCTCCAC | 2454 |
| Gbx2 | GAAGCTTCGGTCTGAGCAAG | 2455 |
| Gbx2 | GGCTGGCGGTGAAAGGGAAG | 2456 |
| Gbx2 | GAGCAGGGATCGCTCACGGA | 2457 |
| Gbx2 | GTATTATTATTACCTGGAGG | 2458 |
| Gbx2 | GAAAGGCACTGGCCAGCAGG | 2459 |
| Gbx2 | GTTGCGGCACACACTGTCCC | 2460 |
| Gbx2 | GTTATTTCCCAACTATGGCC | 2461 |
| Gbx2 | GCGGCTGAACTTCCCTGGTG | 2462 |
| Gcm1 | GTTATGAATGCCACAGAGAG | 2463 |
| Gcm1 | GAGCTTCAGACTCTTGGACT | 2464 |
| Gcm1 | GGTAAGGTCAGCTACTCCAC | 2465 |
| Gcm1 | GATGAGGCATGGCAGAACTG | 2466 |
| Gcm1 | GGAATCCCAGGTAGTCTGCT | 2467 |
| Gcm1 | GCTTTCAGCCAGGGACAGGT | 2468 |
| Gcm1 | GGAGTGTCTCTGCAAATTCA | 2469 |
| Gcm1 | GTCACCCATAGCATGCCTGA | 2470 |
| Gcm1 | GTCTAAAGGTGAGACTGGAA | 2471 |
| Gcm1 | GAGATGGCTTTCAGTGTTTC | 2472 |
| Gcm2 | GTCACTCTTAGACTCAGCGG | 2473 |
| Gcm2 | GCAGGTCACTGTTAGAGGAG | 2474 |
| Gcm2 | GCAAATCTGAAGGTTGGGAC | 2475 |
| Gcm2 | GGTTGAGGCTCTGGAAGCAA | 2476 |
| Gcm2 | GCTAAGGCTGACAATGGAAT | 2477 |
| Gcm2 | GCTGGTGCGCTTTACAGCCA | 2478 |
| Gcm2 | GTTTCCAACTTGGTCTGTTT | 2479 |
| Gcm2 | GAAGTTAAGCAGTAGGCAGT | 2480 |
| Gcm2 | GGTTTCCAACTTGGTCTGTT | 2481 |
| Gcm2 | GTGACCCAAACAGACCAAGT | 2482 |
| Gfi1 | GAAATGAGATCCTGGAGGAC | 2483 |
| Gfi1 | GTGAGCAGTTTAAGTGCTGC | 2484 |
| Gfi1 | GCGACGAACAGAAGCGAAAG | 2485 |
| Gfi1 | GCAGAAAGAAACCTGCGCCT | 2486 |
| Gfi1 | GGGAGCATAGGAGGAAGGCA | 2487 |
| Gfi1 | GCATAGGAGGAAGGCAGGGA | 2488 |
| Gfi1 | GAAGGCAGGGAAGGGAGAAG | 2489 |
| Gfi1 | GGACTATGTGCTGCAGTGGC | 2490 |
| Gfi1 | GACGAACAGAAGCGAAAGAG | 2491 |
| Gfi1 | GTTTCTCCTGGGACAAGTGT | 2492 |
| Gfi1b | GAGCATGGAACTTTGGAACA | 2493 |
| Gfi1b | GGTTTGGGTCAGGGCTGTAT | 2494 |
| Gfi1b | GGACTGGACCAGGAGTTCTC | 2495 |
| Gfi1b | GATGGATGCCTCCAGAGATG | 2496 |
| Gfi1b | GTTTGAGGCCTTTCTGCTGA | 2497 |
| Gfi1b | GATTGAATACCCAAGTACCA | 2498 |
| Gfi1b | GTGTAGCACAACCAGTTCAA | 2499 |
| Gfi1b | GAAATGCCCTGCGCTGGCCT | 2500 |
| Gfi1b | GAACATGGACCCAGATGTGG | 2501 |
| Gfi1b | GCTTTAGACAAGGAACCGGT | 2502 |
| Gli1 | GTCACAGTAGAAACAGATAA | 2503 |
| Gli1 | GTGCGACCTATGGAACATGA | 2504 |
| Gli1 | GTATAGGGTCCCTCAAGGGA | 2505 |
| Gli1 | GTGGTCCAGGGCTGGAAACT | 2506 |
| Gli1 | GGCAGTATAGGGTCCCTCAA | 2507 |
| Gli1 | GGTGACTGGACACAGAGAGA | 2508 |
| Gli1 | GGATATACGAGGGAAGTGAG | 2509 |
| Gli1 | GATATACGAGGGAAGTGAGC | 2510 |
| Gli1 | GGGTGGATAGAAGCTAGAGA | 2511 |
| Gli2 | GGTTTGTTTACATGTATTGG | 2512 |
| Gli2 | GGTAACAAGAAAGGAAGAAT | 2513 |
| Gli2 | GATCCAATCAGTGAGTAACA | 2514 |
| Gli2 | GGGTTTGTTTACATGTATTG | 2515 |
| Gli2 | GAAGGAGCTTTCTCTAAGGC | 2516 |
| Gli2 | GTCCACTCCAAGAAGCAAGC | 2517 |
| Gli2 | GAACAACCAGCGGAGGGCTG | 2518 |
| Gli2 | GCTACGGCGCACAGAGGATC | 2519 |
| Gli2 | GTAGCTGGAACTTTCTGGTA | 2520 |
| Gli3 | GGCCTGGATGTGTCTGTGTG | 2521 |
| Gli3 | GAAACATCCTTCACTCATCT | 2522 |
| Gli3 | GATACATTGITTCTGGCATT | 2523 |
| Gli3 | GTTATCTCTTAACTCAGTAG | 2524 |
| Gli3 | GGAAGTTTCAGGCTTGGCCT | 2525 |
| Gli3 | GAGAGGTGGGCAACTCAGAT | 2526 |
| Gli3 | GTTCTGATTTGGTTCAACCG | 2527 |
| Gli3 | GTTCTGATAGCGTGGTGGGA | 2528 |
| Gli3 | GAAACAAGAGGAATTCTTGA | 2529 |
| Gli3 | GTGAACATGGTTTACAGAAA | 2530 |
| Glis1 | GGAATGGGTACAGGAGAACG | 2531 |
| Glis1 | GCCTGAACTCTCCATTCAAT | 2532 |
| Glis1 | GGCCTGGGTTCAGATGACAA | 2533 |
| Glis1 | GGCAGCAGGGTCTCAACTGT | 2534 |
| Glis1 | GAAGACACTGGCGTGGGAGT | 2535 |
| Glis1 | GTCTGCTACAGCAGGTAGCC | 2536 |
| Glis1 | GTGTGTTTCTGCAACCGGCC | 2537 |
| Glis1 | GTGCAGGCGATGAGCTGTTA | 2538 |
| Glis1 | GGGTCCACACTTTAGAATTG | 2539 |
| Glis1 | GTAAATGAGTTTGTTGCTGT | 2540 |
| Glis2 | GTCCTGGATCTGGACTGGGC | 2541 |
| Glis2 | GATAATGTCGCAGTGCTGCC | 2542 |
| Glis2 | GGATAATGTCGCAGTGCTGC | 2543 |
| Glis2 | GCACATCGGTAGTGTGAAAC | 2544 |
| Glis2 | GTAGTTCAGCACGTGTTCCT | 2545 |
| Glis2 | GTGAGATACTGCACTAGGGC | 2546 |
| Glis2 | GGCCTTGTGCTTATTTCACC | 2547 |
| Glis2 | GCCTACCTTCGCACCAGACC | 2548 |
| Glis2 | GGTCCTGGATCTGGACTGGG | 2549 |
| Glis3 | GCTAAAGTTCCAAGCATCAC | 2550 |
| Glis3 | GGTAACTGGCATGAAGCTGA | 2551 |
| Glis3 | GACCACTGGAGTGTACAATG | 2552 |
| Glis3 | GCTGGAATAAATTCCATGTG | 2553 |
| Glis3 | GGACCTGTTGTCAACTCTCA | 2554 |
| Glis3 | GAAGGTGATGGCCAAAGGTA | 2555 |
| Glis3 | GGTACAGIACGAAGGCCAGG | 2556 |
| Glis3 | GTCAAGAGGGAGACACTGGC | 2557 |
| Glis3 | GGCAAGCTCTCTGAGGTAAC | 2558 |
| Glis3 | GCTAGCTAAAGTGAACAATG | 2559 |
| Gm4736 | GTGACTGAAGTACTATATAG | 2560 |
| Gm4736 | GGCCTACAAAGTCATCATGA | 2561 |
| Gm4736 | GGAAGGCCACAGTCTTTATA | 2562 |
| Gm4736 | GGCCACAGTCTTTATAAGGA | 2563 |
| Gmeb1 | GTCAGCTCGAAGGAGCACAT | 2564 |
| Gmeb1 | GGCAGTGAATGGAGCTTGTA | 2565 |
| Gmeb1 | GTGGAGTCCTCTCTGAGGCT | 2566 |
| Gmeb1 | GGTCAGCCACTGGGTTCAGC | 2567 |
| Gmeb1 | GAAAGCCTAGGTCAGCCACT | 2568 |
| Gmeb1 | GTGTGAGGAGGGAAGTAGGT | 2569 |
| Gmeb1 | GATGTCCTCTGTAAAGGATG | 2570 |
| Gmeb1 | GGCAATGTGGTCAGGCCTTG | 2571 |
| Gmeb1 | GTGGTGGAACTCAGGTGGTC | 2572 |
| Gmeb1 | GGTGGGTAAGTGCTCTGACA | 2573 |
| Gsc | GAACCTATCGGCACCCACGC | 2574 |
| Gsc | GTGAACAGCCTCTTCCTTCT | 2575 |
| Gsc | GTTTGCCAGGTGGCAATGTT | 2576 |
| GsC | GTTAGGAGCTAGGGAGAGTC | 2577 |
| Gsc | GCGCAGAACTAGGCAGTGCG | 2578 |
| GSc | GCCACTCAATATGTTGAGAA | 2579 |
| Gsc | GGGTCCGGGAGCTTCTTTCT | 2580 |
| Gsc | GATAGAGACCGGCTTCAGTT | 2581 |
| Gsc | GGAGAGATGCCAAGAGGAGG | 2582 |
| Gsc2 | GCCAAGTATTTGTTCTCAGT | 2583 |
| Gsc2 | GCAGCCATTCTGTAACCATG | 2584 |
| Gsc2 | GAGGGAATGAGGGAAGCCAG | 2585 |
| Gsc2 | GGAGGGAATGAGGGAAGCCA | 2586 |
| Gsc2 | GCCAGGCTCTGTGCACTTGG | 2587 |
| Gsc2 | GAAGCCCATAGAGTCCTCAC | 2588 |
| Gsc2 | GCACCATGTCATCTTCCTAC | 2589 |
| Gsc2 | GGACTTGGTAAAGTGGGAGA | 2590 |
| Gsc2 | GGGATTAGCACGCGCGAACG | 2591 |
| Gsc2 | GGGATTAGCACGCGCGAACG | 2592 |
| Gsx1 | GAGCAATTAGAACGGGAATT | 2593 |
| Gsx1 | GGGAGTGAGAGCCGAATTCG | 2594 |
| Gsx1 | GTTGCCAGCGCCTTCTCTTC | 2595 |
| Gsx1 | GGAACGCAGAGGCAGAAGGC | 2596 |
| Gsx1 | GAAGCTGTGTACACAGAGCG | 2597 |
| Gsx1 | GAGAGAAGAGACTCCACAGG | 2598 |
| Gsx1 | GATCGCCAGCGCAAAGCCAA | 2599 |
| Gsx1 | GTAACAGAAAGAAAGGGACC | 2600 |
| Gsx1 | GGAAGAAGTAACAGAAAGAA | 2601 |
| Gsx1 | GAGTGCACCGGCGTGTCTAG | 2602 |
| Gsx2 | GCCGAATAAATCCTTCCACG | 2603 |
| GsX2 | GAGGGAGAAGACAGATATAG | 2604 |
| Gsx2 | GAGCTCTAATTGCCAGGACT | 2605 |
| Gsx2 | GTGGTCACAGAGATGGAAAG | 2606 |
| Gsx2 | GGGCAGGGAACAGCAGTTGG | 2607 |
| Gsx2 | GAGAGTGATGGAGGGAGAGG | 2608 |
| Gsx2 | GCCTACCTTCCTCCCTCGCT | 2609 |
| Gsx2 | GAGAGTAGGTTGGTCGGAGC | 2610 |
| Gsx2 | GCTGGTTAGAAAGATGCACA | 2611 |
| Gsx2 | GGTAGGTTATCTACAGTCCT | 2612 |
| Gft2a2 | GCGTGAAAGGCTTCAGTGTG | 2613 |
| Gtf2a2 | GGTTGGTATCAGTCTCCACC | 2614 |
| Gtf2a2 | GACTGCAGTGTAGGGAAACC | 2615 |
| Gtf2a2 | GCAGCTATAGGTACTGCAGA | 2616 |
| Gtf2a2 | GCAAGAGGTGCCAGGAAGTG | 2617 |
| Gtf2a2 | GTTTACCAGCCGTGAAGGGT | 2618 |
| Gtf2a2 | GAGCCAAAGTATAACAGAGA | 2619 |
| Gtf2a2 | GTCTATATACAAAGGTACCA | 2620 |
| Gtf2a2 | GGTAGCTGTCAGTTACTCCA | 2621 |
| Gtf2a2 | GAAACAGATCACGTATGGTG | 2622 |
| Gtf2f2 | GTCCTGACGTAGTCGTGCGC | 2623 |
| Gtf2f2 | GTTTGAAAGAGGCTCTGAAA | 2624 |
| Gtf2f2 | GTGTAAAGATCAGGGAAAGC | 2625 |
| Gtf2f2 | GCAGGTGGATGGGCTTGGTG | 2626 |
| Gtf2f2 | GCATCACACACTATCATATG | 2627 |
| Gtf2f2 | GCAGTAAGGTATTGGAAGAA | 2628 |
| Gtf2f2 | GAACCGTGCGTTTACAGCAA | 2629 |
| Gtf2h1 | GGTGGAAGCAAGAAGGCACG | 2630 |
| Gtf2h1 | GCCCAGTATGTAAAGATCTT | 2631 |
| Gtf2h1 | GATGACAGGTGGAAGCAAGA | 2632 |
| Gtf2h1 | GTTCAGGATAGCTGAATAAT | 2633 |
| Gtf2h1 | GTTCTTCCGCTGGGAGGGAC | 2634 |
| Gtf2h1 | GCCTTCGGGCAGTAGATTAA | 2635 |
| Gtf2h1 | GCCAGCGTTTGTTAGGAGGG | 2636 |
| Gtf2h1 | GCCTCACTTCCTTCGTTCTC | 2637 |
| Gtf2h1 | GGTAAGTTGAGACCGAAGAA | 2638 |
| Gtf2h1 | GGCGTGATCGTCACGTGACG | 2639 |
| Gtf2h2 | GCCAGGCTTGCTCTTTGCTT | 2640 |
| Gtf2h2 | GTTCTCTTGAACACAAGGAA | 2641 |
| Gtf2h2 | GACAGATCACCTCCCACATG | 2642 |
| Gtf2h2 | GAGGGCAACTACGTATGGTG | 2643 |
| Gtf2h2 | GACTGCCGGTACTTCCGGTG | 2644 |
| Gtf2h2 | GTTCACCAATATTTCTGCTG | 2645 |
| Gtf2h2 | GTGTAGACAAGTGTGAGACC | 2646 |
| Gtf2h2 | GGGAGGTGATCTGTCCTGCC | 2647 |
| Gtf2h2 | GCTGCCAGAAGAGGGAGCTA | 2648 |
| Gtf2i | GGCCTGCTGGAGAAGGAAGG | 2649 |
| Gtf2i | GTTCATGCCGCAAGGCTGTC | 2650 |
| Gtf2i | GGGTTCAGAACTACAACTCC | 2651 |
| Gtf2i | GTGGCCTGCTGGAGAAGGAA | 2652 |
| Gtf2i | GTTTACTTTCTTTGTAGCTG | 2653 |
| Gtf2i | GTAAACTTAAGACCCTCCTC | 2654 |
| Gtf2i | GAGGGCGCCCGAATATTCGG | 2655 |
| Gtf2i | GGCGGACATAAGCGGTGGGA | 2656 |
| Gtf2i | GGACAGGCAACGGATGGGAG | 2657 |
| Gtf2i | GTCGCCTGATTTGCAGAGGG | 2658 |
| Gtf2ird1 | GGGATCAGAAACAAGGCCAT | 2659 |
| Gtf2ird1 | GTAGCTGGCAGAGAGGCTAT | 2660 |
| Gtf2ird1 | GGACAGGATCAGTAGAGGGA | 2661 |
| Gtf2ird1 | GGCTAGGCCTTTGCTGGGAT | 2662 |
| Gtf2ird1 | GTGTCCAAGGTCAGAAGGGA | 2663 |
| Gtf2ird1 | GATGAGGGATGATGGAGATG | 2664 |
| Gtf2ird1 | GTAGAGGGAGGGAGGGAAGG | 2665 |
| Gtf2ird1 | GGGACAGGATCAGTAGAGGG | 2666 |
| Gtf2ird1 | GTAGTATACAGGAGGTCAGA | 2667 |
| Gtf2ird1 | GATCTAGAAGGAGACCAGGT | 2668 |
| Gzf1 | GGTAAAGCAATGATTTACCG | 2669 |
| Gzf1 | GGTGGGTCAAGTCTTGGCGT | 2670 |
| Gzf1 | GCAGAGCTATTTGACAAAGT | 2671 |
| Gzf1 | GTGTGAGGGACAAAGCGCTG | 2672 |
| Gzf1 | GTGTTATGGAGCCAACCACA | 2673 |
| Gzf1 | GCCTGAGTCTCCCAGTGTGA | 2674 |
| Gzf1 | GGAGACTCAGGCAGCCACTG | 2675 |
| Gzf1 | GCTAAGGCGCAACCAAAGGA | 2676 |
| Gzf1 | GTGGGTCAAGTCTTGGCGTA | 2677 |
| Hand1 | GAGGTGGAAGTGGGAGGGAA | 2678 |
| Hand1 | GTAACTTAGGAGACTGAAGC | 2679 |
| Hand1 | GTTGTGCAAGAGATTGTGAG | 2680 |
| Hand1 | GTGTAAGACAATTACCAGGC | 2681 |
| Hand1 | GTTCAGTACAGGGAGTGAGC | 2682 |
| Hand1 | GAAGTGGGAGGGAAAGGGAG | 2683 |
| Hand1 | GTGAGTGTCCATTGTCCTTG | 2684 |
| Hand1 | GTGATCTGGGATCTCAGGCA | 2685 |
| Hand1 | GGGCACTGACCAGTTTGTTC | 2686 |
| Handl | GTGGGAGCCTGAAGGCCATT | 2687 |
| Hand2 | GCCAGGTAAACTTGCTGCTT | 2688 |
| Hand2 | GCTTGTACAGCCCAAGAGTG | 2689 |
| Hand2 | GGCTGTACAAGCAGGCCCTC | 2690 |
| Hand2 | GTCTGGAAGGCCACATCAGA | 2691 |
| Hand2 | GTAGCTGGACCTAGTCTTGC | 2692 |
| Hand2 | GGACCTGAGGAGGCAAGCAG | 2693 |
| Hand2 | GTACCCTGGGAGCAAGAAGA | 2694 |
| Hand2 | GAAGAAGGTCCCTGTGTAAT | 2695 |
| Hand2 | GTGCTGTCAGTGAGGAGTGA | 2696 |
| Hand2 | GTGATTATGAGGGAACTAAC | 2697 |
| Hbp1 | GTTGCATCATCAAAGATTTG | 2698 |
| Hbp1 | GTATCTGAAAGTTGTACACT | 2699 |
| Hbp1 | GGTGCTGAAATACCCAACCA | 2700 |
| Hbp1 | GTTTCTCTTTCTACTTTGTT | 2701 |
| Hbp1 | GGCCTAGAGCGTCCTTGGTT | 2702 |
| Hbp1 | GTTGGCGGCGTATTGAGTCA | 2703 |
| Hbp1 | GCCAAGTGCCATGTACTGTA | 2704 |
| Hbp1 | GGCTGTGTCTCAACTAATTC | 2705 |
| Hdac2 | GTTGGACACAGTTTCACAAG | 2706 |
| Hdac2 | GGAAGAAGACTAGCATGAGT | 2707 |
| Hdac2 | GGGAAGAAGACTAGCATGAG | 2708 |
| Hdac2 | GAGTAATTCTAAGTCTCTTG | 2709 |
| Hdac2 | GGTTGGGTCAGGGACCACAG | 2710 |
| Hdac2 | GTGTTTATTACGAGCAGGTA | 2711 |
| Hdac2 | GATAAAGTAGACAAAGCACG | 2712 |
| Hdac2 | GGAGTAATTCTAAGTCtCTT | 2713 |
| Hdac2 | GGTAGCGGGTGTGTGTGTGG | 2714 |
| Hdx | GCACTTATCTGCTAAATCTG | 2715 |
| Hdx | GCAATCACCTGTGAATTACA | 2716 |
| Hdx | GGAAGAGGCAGCCCTACTAC | 2717 |
| Hdx | GGACCCAGTTTGAGCACACT | 2718 |
| Hdx | GTTGTACACTTACTTTGTTC | 2719 |
| Hdx | GAATATGGCAAAGTGAAAGA | 2720 |
| Hdx | GTAGTAGGGCTGCCTCTTCC | 2721 |
| Hdx | GAAAGCAAAGTACAAATTGT | 2722 |
| Helt | GGGAGAGCTTCTGGAGACGG | 2723 |
| Helt | GCTGTGAGATGCAGGACTTC | 2724 |
| Helt | GGATGTCCGGACAAATAAAG | 2725 |
| Helt | GTTAGACAGTGAGACTGGGT | 2726 |
| Helt | GCAGCACCTAGGAAGCTCCG | 2727 |
| Helt | GTAAATCACCCGGAGATCCA | 2728 |
| Helt | GTATATTCACTCGCACACAA | 2729 |
| Helt | GTGCCTGGAGGGTGTGGAAT | 2730 |
| Helt | GGTATATTCACTCGCACACA | 2731 |
| Helt | GAAGTTGATCCTCTTACTGT | 2732 |
| Hes1 | GGCTTTCTGGACAATGCTTG | 2733 |
| Hes1 | GTTCTATAACTGAGGACATC | 2734 |
| Hes1 | GAGAGGAAGGGAGCTACCGA | 2735 |
| Hes1 | GCAGTTTGACATCAGCCGGC | 2736 |
| Hes1 | GCTGATGTCAAACTGCAGCT | 2737 |
| Hes1 | GATATATATAGAGGCCGCCA | 2738 |
| Hes1 | GAGAGGAATGAATGGGCTAG | 2739 |
| Hes1 | GTAAGGGCATGTTTAGCGTG | 2740 |
| Hes1 | GGCTCCTAAGTGGCACAGGT | 2741 |
| Hes1 | GCTTCTAGTAGGGCTACTGG | 2742 |
| Hes2 | GGTTGTTCGGGTCTCGCCTT | 2743 |
| Hes2 | GTGCTTGAGGAGCGGAGCCA | 2744 |
| Hes2 | GTCTTTGATCAGTGTAGGGT | 2745 |
| Hes2 | GCTTGTACAAAGTAACTCCT | 2746 |
| Hes2 | GCTCCATTGAGGGCTTTGGT | 2747 |
| Hes2 | GTCACATGACAGACGAGTGG | 2748 |
| Hes2 | GGGACACTGGACTGAGTTGG | 2749 |
| Hes2 | GATCAGTGTAGGGTGGGCTT | 2750 |
| Hes2 | GCGTCTGTCAGGAGCCTTTC | 2751 |
| Hes3 | GACAGACTCATCACTGCCCT | 2752 |
| Hes3 | GCACAAACTGGTATGGGTGC | 2753 |
| Hes3 | GAAGCCCTGAAATGACTCAG | 2754 |
| Hes3 | GACTGGGACGAGAGCTTCCT | 2755 |
| Hes3 | GGCTTCTTCCCTTCCCGCTC | 2756 |
| Hes3 | GTGTGGTTTGACAGGGAGCA | 2757 |
| Hes3 | GGGATACAGTCACACAGAGA | 2758 |
| Hes3 | GAGCTCCGAGGAATTCTAAG | 2759 |
| Hes3 | GCTCAGTGGTTAGCACATTC | 2760 |
| Hes3 | GAAACCCTGCTTATGCAAAC | 2761 |
| Hesx1 | GAGAGATACACGTTTACATG | 2762 |
| Hesx1 | GCAACAGGGACTGAGCGAGC | 2763 |
| Hesx1 | GAATATGAGAGTGCAAGTGG | 2764 |
| Hesx1 | GGCATTTGACAAAGCTTTGC | 2765 |
| Hesx1 | GCACTCTGTGTTAATAACAC | 2766 |
| Hey1 | GTGGATGGAGAACTGGACCT | 2767 |
| Hey1 | GTCATCTGCAGCTCAGAAAG | 2768 |
| Hey1 | GGGATTGCAGGCTCCAAGAG | 2769 |
| Hey1 | GTGATATGAGGCTCTGAAGA | 2770 |
| Hey1 | GCAGATTGGCAGCCGCATGG | 2771 |
| Hey1 | GTGTTAGATGGAGATGTAAT | 2772 |
| Hey1 | GATAAGGAGAAGGGAGAGAA | 2773 |
| Hey1 | GCACCTTCTGATAAGGAGAA | 2774 |
| Hey1 | GAAACATGGGATGGCGTCAA | 2775 |
| Hey1 | GGGTGCTCCGTCACTTTAGG | 2776 |
| Hey2 | GCACACACCGGAGAAACTGG | 2777 |
| Hey2 | GTGAGCGTGTGTGACGTCTA | 2778 |
| Hey2 | GACACAGAAACTGGAGGGAG | 2779 |
| Hey2 | GGCTGTCTGCTCTGTCCCTG | 2780 |
| Hey2 | GAGTTCAAAGTTCTCGGATT | 2781 |
| Hey2 | GCGTGTGTGACGTCTAGGGT | 2782 |
| Hey2 | GGTGTGTTTAGACAGGAGAC | 2783 |
| Hey2 | GCTGCACACACCGGAGAAAC | 2784 |
| Hey2 | GACTGGACTGGGCGCAGATT | 2785 |
| Hey2 | GCAAATCACAGGATCATCGG | 2786 |
| Heyl | GAAATGCCTAGTGCACACAT | 2787 |
| Heyl | GGCAGGGAGATGGTGGAGGT | 2788 |
| Heyl | GTGCTATGCTGTCAGTTCAG | 2789 |
| Heyl | GGCAGAAGAAGAAGGAGAGC | 2790 |
| Heyl | GACTGAAGAATTACTTCCAA | 2791 |
| Heyl | GAGCCTTCGGCTTCTCTTTC | 2792 |
| Heyl | GGCACCAGGGAGAGGAAGAG | 2793 |
| Heyl | GTAGGGTGTGGTGGTTGGTG | 2794 |
| Heyl | GTGCAGAGGGAAGCTGAGGG | 2795 |
| Hhex | GAGTTGGGCAGTTTCTGCTA | 2796 |
| Hhex | GAGAAGCGATGGGACTCTGC | 2797 |
| Hhex | GACTGCGACCGTCGAAGAGG | 2798 |
| Hhex | GCAGTGTTCTTCGATCCAAT | 2799 |
| Hhex | GGCTTAGTAGTAAGGGTTAC | 2800 |
| Hhex | GTGAACTACTGGAAGGTTGC | 2801 |
| Hhex | GGCCAGAAGGCTGCGCTTCT | 2802 |
| Hhex | GATTCCGTTAGCATCCAGGG | 2803 |
| Hhex | GAATCTGAAGCCAGCGCCAT | 2804 |
| Hhex | GTTCGTTTCCTGCTTCCACC | 2805 |
| Hic1 | GACCGGCAAGACAGACCGAC | 2806 |
| Hic1 | GTGTCTTCCCTAGAGGACTC | 2807 |
| Hic1 | GTGTGGAGCATGCAGGACGG | 2808 |
| Hic1 | GGGCTCAATAGCTTGGCAGA | 2809 |
| Hic1 | GTGGTATCCTCGCTCTCTCC | 2810 |
| Hic1 | GGGACTCCGGAGTGAGGATG | 2811 |
| Hic1 | GCTCTCTCCTGGTGTGTGTG | 2812 |
| Hic1 | GAGTGAATAAACACAGAACG | 2813 |
| Hic1 | GTAAGTGGATTAGATGGAGG | 2814 |
| Hic1 | GACCACCAACAGTCGGAGAT | 2815 |
| Hif1a | GCCATAAATAGATACCACCA | 2816 |
| Hif1a | GCAGTCCTGTCAAGGTCTGT | 2817 |
| Hif1a | GACACAACTGAGTCTGAATC | 2818 |
| Hif1a | GTAAGGTCTGCAAAGTGAGT | 2819 |
| Hif1a | GGCACTTTAACAGTTGAAAC | 2820 |
| Hif1a | GCTGAGAGCAACGTGGGCTG | 2821 |
| Hif1a | GCTCTCAGCCAATCAGGAGG | 2822 |
| Hif1a | GTTGCTCTCAGCCAATCAGG | 2823 |
| Hif1a | GTTGTGCAGATTGTGAAATG | 2824 |
| Hira | GCGCATTTATTAGAAGAGCG | 2825 |
| Hira | GTGTCTGACGTGTGCCTGGC | 2826 |
| Hira | GGAACTTTGGATGCTTTCTT | 2827 |
| Hira | GGTCTGGGATTCCGAGAGGC | 2828 |
| Hira | GAAATCTGCTTGCTAACCCA | 2829 |
| Hira | GAAGTGAACGTGCTGAACTA | 2830 |
| Hira | GGGTGATGCTGTGTGCTGCG | 2831 |
| Hira | GTCTGCCGCTAGATGCATGC | 2832 |
| Hira | GTCCACTGTCTTCCCGAGGA | 2833 |
| Hira | GGGCGCATTTATTAGAAGAG | 2834 |
| Hivep1 | GGGCGTGAGAGGAAACGCTG | 2835 |
| Hivep1 | GGGCTGGGTTGTTGACTTGG | 2836 |
| Hivep1 | GTGGGCGTGAGAGGAAACGC | 2837 |
| Hivep1 | GCTTAGGCTCTGGGAAGCAC | 2838 |
| Hivep1 | GGTTCAAACAGCTCGGCTGG | 2839 |
| Hivep1 | GCTTGGCTTGGGAAGAGCCC | 2840 |
| Hivep1 | GAACTTTGGAAGCCGAAGAG | 2841 |
| Hivep1 | GGAACTTTGGAAGCCGAAGA | 2842 |
| Hivep1 | GGAATAACCTTGGCTTTCCT | 2843 |
| Hivep1 | GAGAGCATCGGTCCAACCCG | 2844 |
| Hivep2 | GAAGTTCTCTGATCCTACAA | 2845 |
| Hivep2 | GACTCGCCAGTGTTTCTGCG | 2846 |
| Hivep2 | GAACGCTCGAATCCAAAGAG | 2847 |
| Hivep2 | GAAGGGAATCCCAAGCGAGT | 2848 |
| Hivep2 | GCGAGAAATCCTTGGTACGC | 2849 |
| Hivep2 | GGCTAGAGAGGGAAGGGAAT | 2850 |
| Hivep2 | GAGAACCAGAAGCGCGCAGC | 2851 |
| Hivep2 | GGACTCGTGTGCACCCTCAA | 2852 |
| Hivep3 | GTGGGCTTCAGAGTGCATGA | 2853 |
| Hivep3 | GGAGAAACATATGCAAATAC | 2854 |
| Hivep3 | GTTGGATCAGAATGAGGTCA | 2855 |
| Hivep3 | GCGGTCTTGACGTTGAGCGC | 2856 |
| Hivep3 | GAACCTCCAACTTAACCTCT | 2857 |
| Hivep3 | GGGATTAAGCTGGAGGTGGA | 2858 |
| Hivep3 | GTAGTTGGCATGCACAGTTT | 2859 |
| Hivep3 | GTGATGGAGGAGCCTGCTGA | 2860 |
| Hivep3 | GTATTGGAGAATAGCAGCCT | 2861 |
| Hivep3 | GGATCCCTAGCTATTGAAAG | 2862 |
| Hltf | GTCAGACGCTCCCTATCTGA | 2863 |
| Hltf | GGCTTCTTGAGTGAGCCACA | 2864 |
| Hltf | GCTCAAGGTTCTGACGGACT | 2865 |
| Hltf | GTATGCGAGACCCTGAGTTC | 2866 |
| Hltf | GCTAAGAATAAATAGAGTCA | 2867 |
| Hltf | GTTCACGAGGTGAAGGGCTG | 2868 |
| Hltf | GAGGCACCAATGCATTGTCG | 2869 |
| Hltf | GAAATGCAGGTATCCCACCC | 2870 |
| Hltf | GTAAGGTCCGAGGTGGTGGC | 2871 |
| Hltf | GTGGTGTGGACACGTCTCAC | 2872 |
| Hlx | GATGTCCCAGTATCAGGGAC | 2873 |
| Hlx | GCTATGATGTCCCAGTATCA | 2874 |
| Hlx | GGCTACTATCAGCTCAGGAT | 2875 |
| Hlx | GTAGACTTGGGTCGGGATTC | 2876 |
| Hlx | GGCTATGATGTCCCAGTATC | 2877 |
| Hlx | GTCTAGCAGGGAGCAGAGGG | 2878 |
| Hlx | GCCTGTGGTCTGTTTGGGAG | 2879 |
| Hlx | GGGAGCTCCGATTAGGCCTC | 2880 |
| Hlx | GCCAAAGCGACTGGTCTACA | 2881 |
| Hlx | GTTGCGTTGTGCACCTAGTC | 2882 |
| Hmbox1 | GTCTAGCATCCATGGTATTC | 2883 |
| Hmbox1 | GCTGGAAGCTGTAGTTCCCT | 2884 |
| Hmbox1 | GATGGAAAGGAAGGATGAAT | 2885 |
| Hmbox1 | GCGGCGGCGATGAATTTGAG | 2886 |
| Hmbox1 | GACTTTCACAGGTGCACATG | 2887 |
| Hmbox1 | GTTTCCACTACTAAGTCAGA | 2888 |
| Hmbox1 | GTTTATTCAAACCCTTTGGT | 2889 |
| Hmbox1 | GAAGACCTCCTGACAGATGC | 2890 |
| Hmbox1 | GAATCTTCCTAATTGCTACG | 2891 |
| Hmga1 | GTGTTTGCCTACTTCTAGAG | 2892 |
| Hmga1 | GGATACCCTTCCTTCCTGGA | 2893 |
| Hmga1 | GGCGGCCCTGCTGTTTAAGT | 2894 |
| Hmga1 | GGTTCGAGTTTCCCGCCTCT | 2895 |
| Hmga1 | GAGATCCCAACTGGAATGTC | 2896 |
| Hmga1 | GGGCACAAAGATGGAGGGCG | 2897 |
| Hmga1 | GCTCCTTTGAAGCCTGCACC | 2898 |
| Hmga1 | GTTGCAAGGAAGTCCTGTTC | 2899 |
| Hmga1 | GTAGGAGATGCAGGAAGCAC | 2900 |
| Hmga1 | GAAGACCAGACAAGAGGCAG | 2901 |
| Hmga2 | GAAGTTTCCGGAAGCATTCA | 2902 |
| Hmga2 | GAGTTCTGAGTCTTCTCATT | 2903 |
| Hmga2 | GTTATGGGCGTCCCAGCACG | 2904 |
| Hmga2 | GGCATTTCTCAGTGGAGCGG | 2905 |
| Hmga2 | GTGCACGCTTGTTTGTGCGC | 2906 |
| Hmga2 | GACAGCAGGTGAAGGAGAAA | 2907 |
| Hmga2 | GCTTGGAGAGGGAAGAGACT | 2908 |
| Hmga2 | GCGGCACTGCACAGATGCAG | 2909 |
| Hmga2 | GCACCCAAATTTATAAAGCA | 2910 |
| Hmga2 | GGTAGAAGCCAAGCTCTCCA | 2911 |
| Hmx1 | GAAGTCTGGGTTACCCTCTG | 2912 |
| Hmx1 | GATGGAATGCTCTCATATCC | 2913 |
| Hmx1 | GGATAGGTGAGACAGAAACA | 2914 |
| Hmx1 | GCTTGGGAGCACTAGAAAGA | 2915 |
| Hmx1 | GTCTTACCCAGCACTCCCTC | 2916 |
| Hmx1 | GGACCAGGCAGACTCTGCTA | 2917 |
| Hmx1 | GGAGAGCCTTGCTCACCCTC | 2918 |
| Hmx1 | GATCCAATCGCGCAGATTTA | 2919 |
| Hmx1 | GATCTGTCAGGAAACCTGCC | 2920 |
| Hmx1 | GTTGCCTTCTCCTGGACAGT | 2921 |
| Hmx2 | GATCAGGTAACAGGTGCTCT | 2922 |
| Hmx2 | GAGAGCACTGACTGGTGTTG | 2923 |
| Hmx2 | GCGACACTAAGAAGTTTGCC | 2924 |
| Hmx2 | GGGAGTGAAGTTTGGTCACG | 2925 |
| Hmx2 | GTGTGGGAAGGCGAGCTGTG | 2926 |
| Hmx2 | GCATCCTGAAACAGAAAGCC | 2927 |
| Hmx2 | GGAGTCTGAAAGAGGAGGTG | 2928 |
| Hmx2 | GTCACCGCATTAACCTCTTC | 2929 |
| Hmx2 | GGAGCTTTGCTGCTCTGGGC | 2930 |
| Hmx2 | GGGAGAGGCCACAAGAAGGA | 2931 |
| Hmx3 | GCCGAGATICICCAGGGACT | 2932 |
| Hmx3 | GAAAGATAAAGAACGGGCTG | 2933 |
| Hmx3 | GATTTCGTATAAGGCTTTAC | 2934 |
| Hmx3 | GCTACTTACAAGGCAATAGT | 2935 |
| Hmx3 | GCGGGCCTCTGAGGAATAGC | 2936 |
| Hmx3 | GCCGGAAATCAGACCATAAA | 2937 |
| Hmx3 | GGAGAGAACTCTTCCAAAGG | 2938 |
| Hmx3 | GGCCAAGGAACTATCACCAG | 2939 |
| Hmx3 | GCTGCCTCTTAACTCTTCTT | 2940 |
| Hmx3 | GACACCTGCAGCATGTCCCA | 2941 |
| Hnf1a | GCTGGGACAGCAGGAAGCTC | 2942 |
| Hnf1a | GCTAGAGACCTGCATAGGAA | 2943 |
| Hnf1a | GGGAGTCATGGCCTGCAATT | 2944 |
| Hnf1a | GTGGTTGGTGGCACGATTGT | 2945 |
| Hnf1a | GCCTGTTTCTTTGGGCCGCT | 2946 |
| Hnf1a | GAGTGAGCAGAAGGGAGGGT | 2947 |
| Hnf1a | GCAATTGGGAGTGAGCAGAA | 2948 |
| Hnf1a | GCCCAACATCAGACTTCCCA | 2949 |
| Hnf1a | GGCAGTTTCCAGAATCTTCA | 2950 |
| Hnf1b | GATCACCTGTGGGAGGACTC | 2951 |
| Hnf1b | GCAGTAACTCCTCCAAGGCC | 2952 |
| Hnf1b | GAAGACCACCTGTGCAAAGC | 2953 |
| Hnf1b | GGAGCCGACTTAGGGAAGCC | 2954 |
| Hnf1b | GTGCCTCCTTGCTTCCTCTC | 2955 |
| Hnf1b | GGACGGCAGTAACTCCTCCA | 2956 |
| Hnf1b | GAACCTAAGGGACAGTCCAA | 2957 |
| Hnf1b | GTCTGAAAGCTAAAGGGTGG | 2958 |
| Hnf1b | GCTCTGGCAAGTCCCAATCC | 2959 |
| Hnf1b | GTTTGGCTGATAAACAGAAT | 2960 |
| Hnf4a | GGGTGCCTGCCTTGGAAGAT | 2961 |
| Hnf4a | GAAAGACCCAAGTGTGGGCT | 2962 |
| Hnf4a | GAGAACCACAAATCCACTTG | 2963 |
| Hnf4a | GCAGGACCTTAGGAAGCTTC | 2964 |
| Hnf4a | GTGAGTTTAGAAACTCTCTG | 2965 |
| Hnf4a | GACTATTAATGAGCGGGAGG | 2966 |
| Hnf4a | GTTGGTTTCTGACTGACACC | 2967 |
| Hnf4a | GTCCTCTGGGAGACTCAGCC | 2968 |
| Hnf4a | GACTCCCACTAGCTGGAGAA | 2969 |
| Hnf4g | GACATATTGTTGGACTTGAA | 2970 |
| Hnf4g | GGCTGTAAACAGCACACCTG | 2971 |
| Hnf4g | GGGTAAGAACATTAAGGGAG | 2972 |
| Hnf4g | GACATGCCAATGTTGCAGAG | 2973 |
| Hnf4g | GATTTCCATCATATGATCAT | 2974 |
| Hnf4g | GCCTAAGAGATCCAGATGAA | 2975 |
| Hnf4g | GCATCTGCAGTCCTGCTCCC | 2976 |
| Hnf4g | GATCCTCTGAGAGCTTTCTG | 2977 |
| Hnf4g | GTGTTGCAGTCACTGAGGGA | 2978 |
| HnF4g | GCTTTGTTCTGCAAGAGTTC | 2979 |
| Homez | GGGAACCAAACACCTGACTC | 2980 |
| Homez | GGGAAGAGTCTGTGCTTGAA | 2981 |
| Homez | GAGATCTGAAGGTGACCTCT | 2982 |
| Homez | GCCAATC3CGGACCTCTGCT | 2983 |
| Homez | GGAAGGAGATCCACACAATT | 2984 |
| Homez | GAGTTCGTGAAATGAGGAAA | 2985 |
| Homez | GTCTTCCGAGGGCCTTCCTG | 2986 |
| Homez | GCTCTTCTGATTAATGGACT | 2987 |
| Homez | GGGCTGGGAACATGTCTTCC | 2988 |
| Homez | GGAAGGACCACAGGATGCAG | 2989 |
| Hoxa1 | GAGGCCTCCTGGCTCTCTTG | 2990 |
| Hoxa1 | GTAATTTACGTGTGAGTTTG | 2991 |
| Hoxa1 | GTCCCTCTACATTCCGAGGC | 2992 |
| Hoxa1 | GGTGAAGAAAGAGGGCTTGG | 2993 |
| Hoxa1 | GCCTCCTGGCTCTCTTGTGG | 2994 |
| Hoxa1 | GAGCATGCTCACTCTAAAGT | 2995 |
| Hoxa1 | GAGCCTCCTCGGGAAAGCTT | 2996 |
| Hoxa1 | GCAGAGGATTATTTCACTCA | 2997 |
| Hoxa1 | GGGAGGGACAGATGACTGAG | 2998 |
| Hoxa1 | GTGGATGGGACCCTTTCCAA | 2999 |
| Hoxa10 | GAACTGTGGTTTGGGAGGTC | 3000 |
| Hoxa10 | GCTGCCTCAAAGTGGAGGTT | 3001 |
| Hoxa10 | GATGAGGAAGTCCATTCCCT | 3002 |
| Hoxa10 | GACCAGCAATAGAAGCCTGA | 3003 |
| Hoxa10 | GTGTGAGATCCAGACAGGGA | 3004 |
| Haxa10 | GAGCGAGAGAGAAAGCAGTG | 3005 |
| Hoxa10 | GATAGCACTCTGAGAGGGAG | 3006 |
| Hoxa10 | GCAAAGAGTGAGAGGGCGAT | 3007 |
| Hoxa10 | GCCAGATCTCTCATGCTGAA | 3008 |
| Hoxa10 | GGAATGAGGGATTTGGGAGG | 3009 |
| Hoxa11 | GAAGAAAGGGAGGTCTCTGA | 3010 |
| Hoxa11 | GCTACTATTGAGCAGCCTTA | 3011 |
| Hoxa11 | GCTTTGCCTGTTGGCGGTTT | 3012 |
| Hoxa11 | GTGTGCTCTTATCCCTAGTT | 3013 |
| Hoxa11 | GGCTGACAGAGCAATTCGAC | 3014 |
| Hoxa11 | GAAGCCGCCTCTTCTAGAAA | 3015 |
| Hoxa11 | GTGGGTGAGGGATACTCTCT | 3016 |
| Hoxa11 | GAAAGGAAGCCGAGGAGGGA | 3017 |
| Hoxa11 | GAGAGTATCCCTCACCCACC | 3018 |
| Hoxa11 | GCTACAAAGAAAGGAAGCCG | 3019 |
| Hoxa13 | GGGTCCCAGGACATTTCTCT | 3020 |
| Hoxa13 | GTAGTGGGTTCAAGGTGCCG | 3021 |
| Hoxa13 | GAATGCAACAGTGGATTGCC | 3022 |
| Hoxa13 | GATGCAGCAGCTATTCTCTC | 3023 |
| Hoxa13 | GGGCAAATCAATATTTACCC | 3024 |
| Hoxa13 | GCGGTGTTTACAGGCTGGAC | 3025 |
| Hoxa13 | GAACTGGTCAGACATCCAGA | 3026 |
| Hoxa13 | GCTAGACCCTCCCAAGGATG | 3027 |
| Hoxa13 | GCAGTAAGAAGGTAAACTCG | 3028 |
| Hoxa13 | GAAAGGACTCCCTGGGTGTG | 3029 |
| Hoxa2 | GAGGCAAGGAGGAAGCCAAA | 3030 |
| Hoxa2 | GTTTCATACCCGTAGGGCTC | 3031 |
| Hoxa2 | GTTCAAATGCTGATTATCTC | 3032 |
| Hoxa2 | GAAGGTGCTTTGCAGATGGA | 3033 |
| Hoxa2 | GATGGAAGGGTGGTGGCTTT | 3034 |
| Hoxa2 | GAAGCTGAGATGTGTTCTTA | 3035 |
| Hoxa2 | GACCTGCGTGTGGAGATTGG | 3036 |
| Hoxa2 | GGAGGGTAGACGACGACGTG | 3037 |
| Hoxa2 | GCTCCTAAACGCTGCTCTCT | 3038 |
| Hoxa2 | GTGGGTAGAGGCCATGATGA | 3039 |
| Hoxa3 | GTAGGAAAGACATGGAATTC | 3040 |
| Hoxa3 | GATAAGAATGGAGACCTTCG | 3041 |
| Hoxa3 | GGTATTGGCCGGGTGTGTGA | 3042 |
| Hoxa3 | GGACATGAAGGAGGCTTCTT | 3043 |
| Haxa3 | GCCAGAGAAAGAGGGATTCT | 3044 |
| Hoxa3 | GAAACTGGCCCAGCCTAGTC | 3045 |
| Hoxa3 | GGACGGGACATGAGGAGACA | 3046 |
| Hoxa3 | GCATCAAGGTCCAGCCTGGG | 3047 |
| Hoxa3 | GGCACTCCCAAACTACCTAT | 3048 |
| Hoxa3 | GCCATTAACCCTACTTCAGG | 3049 |
| Hoxa4 | GCAGTGCATGTGTATTTGTA | 3050 |
| Hoxa4 | GACCGATTGACAATTAGACC | 3051 |
| Hoxa4 | GAAGGCAAGAGATGCTTCTT | 3052 |
| Hoxa4 | GGCTGTGGAAGGTTCAGGAA | 3053 |
| Hoxa4 | GAGGTTCTATTAAGGAGGAT | 3054 |
| Hoxa4 | GCTCTGGAAAGGAGAGAGAA | 3055 |
| Hoxa4 | GTTCTGAAACGCGAAGTTAC | 3056 |
| Hoxa4 | GCTCGCTTCTCCCACCCTGA | 3057 |
| Hoxa4 | GCAGGGACTCCCTAACAGCC | 3058 |
| Hoxa5 | GGGTCCTGAAAGCTGCGAGG | 3059 |
| Hoxa5 | GGTGCCGTGTATGGGAGTCA | 3060 |
| Hoxa5 | GGCTGCTTGGAAGCTGGGAT | 3061 |
| Hoxa5 | GTCTGTGAAAGACGCTATCC | 3062 |
| Hoxa5 | GCAGTGCCCTGTTTGGTGCC | 3063 |
| Hoxa5 | GCGCGTTAGCGATCTCGATG | 3064 |
| Hoxa5 | GGCTGCTACTCTCCCACTGA | 3065 |
| Hoxa5 | GAGGACTGTGTTGGGCTGTC | 3066 |
| Hoxa5 | GCCAGGTGTGAGGTTCAGGC | 3067 |
| Hoxa5 | GGCACCTGTGGGCAGAAATG | 3068 |
| Hoxa6 | GAGCCTGGCTTGCAGGTGTG | 3069 |
| Hoxa6 | GCTTGTCAGGTTTCCTGTTT | 3070 |
| Hoxa6 | GTCCTGACAGAGTGGAGACC | 3071 |
| Hoxa6 | GCCGATGGTCAAGGTAATTC | 3072 |
| Hoxa6 | GGAGGGCGGTACTGAGAAGA | 3073 |
| Hoxa6 | GCGTCCCAAAGGCGTCCTGA | 3074 |
| Hoxa6 | GAGATTTGACTGGATGGAGG | 3075 |
| Hoxa6 | GATCCTTTGAGTGAAGCTCT | 3076 |
| Hoxa6 | GCCTGTACAAACAGTCTCCA | 3077 |
| Hoxa6 | GGAAGGCCCTGGCTTTGGTG | 3078 |
| Hoxa7 | GCTTAGAAAGGTGAAGCCGC | 3079 |
| Hoxa7 | GGGAACCACTTAGTCCTTTC | 3080 |
| Hoxa7 | GAGACCTGACAACCAGAGTT | 3081 |
| Hoxa7 | GGCTGTCTTGTGTAGATCTT | 3082 |
| Hoxa7 | GACCCTAAGGCGGCAATATC | 3083 |
| Hoxa7 | GAGTAAGAGAGAGAAAGAGA | 3084 |
| Hoxa7 | GCTGCTGAGATTGGCGGAGG | 3085 |
| Hoxa7 | GAGCCGCCAGGAGTGTATGA | 3086 |
| Hoxa7 | GCCAACAGATATACTAACAT | 3087 |
| Hoxa7 | GCAGTTTATGAGGCGTTTAG | 3088 |
| Hoxa9 | GGTGGAGAGCCTAATATTTG | 3089 |
| Hoxa9 | GTAGAGACCCAGCCAGAGAC | 3090 |
| Hoxa9 | GTTAGGGTGGTGTCTCTGTC | 3091 |
| Hoxa9 | GAAGGGTAAGCAACAAGGCC | 3092 |
| Hoxa9 | GATCAGGGAGGGCACAAACT | 3093 |
| Hoxa9 | GTCTCTGGCTGGGTCTCTAC | 3094 |
| Hoxa9 | GTCCTGCCTTGTGCAACTGA | 3095 |
| Hoxa9 | GGAGCCCTCTTCATCCACCA | 3096 |
| Hoxa9 | GTGTCGTGCTGTCGAGAGAA | 3097 |
| Hoxb1 | GAACCTATTGAAGGCCTTGG | 3098 |
| Hoxb1 | GTGATCTCTCCCAGGCCAAT | 3099 |
| Hoxb1 | GGTAACCCTTGAAACTTCTC | 3100 |
| Hoxb1 | GCCTGAGCTAGGGCAAGTCC | 3101 |
| Hoxb1 | GCGGAGGAAGCCAAAGCAGG | 3102 |
| Hoxb1 | GATGAGTTGATGGATAGGTA | 3103 |
| Hoxb1 | GATGCCGCATGGAAAGAGGA | 3104 |
| Hoxb1 | GAGAGGCTGAGGGAGAGAAA | 3105 |
| Hoxb1 | GGAGGGCAAGAGTTCAGGGA | 3106 |
| Hoxb1 | GCCTCAAATACATAAATCCA | 3107 |
| Hoxb13 | GGGAAATAGAGCCAATGTCT | 3108 |
| Hoxb13 | GTCCCAAGATTGCAGGAGCT | 3109 |
| Hoxb13 | GGTGAACAACAACCTGGATT | 3110 |
| Hoxb13 | GAAGGGCTGGGAGGCCACTT | 3111 |
| Hoxb13 | GGGAGCCAAGGCTGGITTCG | 3112 |
| Hoxb13 | GGGAGCAAAGCAGGAATCCT | 3113 |
| Hoxb13 | GCCAATCAGCGCTCATGCCC | 3114 |
| Hoxb13 | GGGTCTGGATTTCCGTTTAA | 3115 |
| Hoxb13 | GCTGCCTCAAAGGAGAACCC | 3116 |
| Hoxb13 | GGCTGCCTCAAAGGAGAACC | 3117 |
| Hoxb3 | GGCGACGCAGCTTTAAACAG | 3118 |
| Hoxb3 | GAACCGAGATTGGAGTCATA | 3119 |
| Hoxb3 | GTCCTGCGATGGTTTCGTTT | 3120 |
| Hoxb3 | GTCTTCTGGTTTCATTCTAA | 3121 |
| Hoxb3 | GGAACAGCGAGCACCGAAGG | 3122 |
| Hoxb3 | GAGGCAACGTAGCTGCATCC | 3123 |
| Hoxb3 | GCCAAGCATCCTAGAGGGTA | 3124 |
| Hoxb3 | GAAGCAGAGAGGCCTCCCTA | 3125 |
| Hoxb3 | GTTGCCTGTAGCCCTGGAGG | 3126 |
| Hoxb3 | GCTGCATCCTGGGCCATGAC | 3127 |
| Hoxb4 | GGGATAGAGAGATGCAAAGC | 3128 |
| Hoxb4 | GAACAAGGACCCAAGCTTCC | 3129 |
| Hoxb4 | GGAGAGGTGTCTGGGTGTGA | 3130 |
| Hoxb4 | GCTCCCACCTGCAGGCAACT | 3131 |
| Hoxb4 | GTCTTCTTGAAGGCAGTCAC | 3132 |
| Hoxb4 | GGCCTTGTGGGTTAAAGGGA | 3133 |
| Hoxb4 | GATCACAAACTAAAGGCTGT | 3134 |
| Hoxb4 | GCAGTTCATTTCCGAATGAA | 3135 |
| Hoxb4 | GACAGAGGCGGCGGCTTTAG | 3136 |
| Hoxb4 | GAGCTCCAAGGGAGAGGAAT | 3137 |
| Hoxb5 | GAGAGACACAACCAACGCTG | 3138 |
| Hoxb5 | GCCAGAATCTATCATCGAGT | 3139 |
| Hoxb5 | GCATCTGGCGAGCTTGTTAA | 3140 |
| Hoxb5 | GTCTTTCAGGTCCCTGCTGA | 3141 |
| Hoxb5 | GCGAAGGGAGAGGTCTGTGG | 3142 |
| Hoxb5 | GACGCGAAGGGAGAGGTCTG | 3143 |
| Hoxb5 | GGTAGTGTCTCACAGCTCCC | 3144 |
| Hoxb5 | GTTGCACAGAGCCAGCAAAG | 3145 |
| Hoxb5 | GTCTCAGCTCAGTGCGGAGG | 3146 |
| Hoxb5 | GAGTCCAGGAGGGAATCTGG | 3147 |
| Hoxb6 | GAGCAAGCATGCCAGTTTGA | 3148 |
| Hoxb6 | GAAGCTGTCTTTGTGAACTG | 3149 |
| Hoxb6 | GGGTTGCAGCGGTCAGTTCT | 3150 |
| Hoxb6 | GAGGCCAGGCCAGCAAGTAG | 3151 |
| Hoxb6 | GCTGCAAACCGCACAGGTGG | 3152 |
| Hoxb6 | GTTGGATACACTGTTTGTCT | 3153 |
| Hoxb6 | GAACCACCTCGGAGCTCTTA | 3154 |
| Hoxb6 | GCACACACACACACAGGAGG | 3155 |
| Hoxb6 | GGATTTATTTGGCTGCAATG | 3156 |
| Hoxb7 | GTAGTAACTAGATGTGACCA | 3157 |
| Hoxb7 | GGAAGGGAGGAAGGAGGCTT | 3158 |
| Hoxb7 | GCAACTTGGTGGGTGGGTGC | 3159 |
| Hoxb7 | GAGTCAGATAGGGATTAAAT | 3160 |
| Hoxb7 | GGAGAAAGAGAAGCTGGAGC | 3161 |
| Hoxb7 | GGGAAGAGATCTACCCAGGC | 3162 |
| Hoxb7 | GCCGTCATACCATTGGCCGA | 3163 |
| Hoxb7 | GAACTCCTTCTCCAGCTCCA | 3164 |
| Hoxb7 | GGAGGAGAGAGGATCGAGGG | 3165 |
| Hoxb7 | GAGGAGAGAGGATCGAGGGA | 3166 |
| Hoxb8 | GGAAGCCGCAGCTCTCACCT | 3167 |
| Hoxh8 | GGAATAAAGTGCAGGACAAT | 3168 |
| Hoxb8 | GACAATGGGTCAGGTGAGAC | 3169 |
| Hoxb8 | GGAAAGAGAAGAAGCCACAC | 3170 |
| Hoxb8 | GGAAGCCAGTCCTTCTGGGA | 3171 |
| Hoxb8 | GAAATAATAGGCACAAATCA | 3172 |
| Hoxb8 | GATTCTCTCTTCAGCAGGTG | 3173 |
| Hpxh8 | GTCATGATTTGAGGACTCAC | 3174 |
| Hoxb8 | GCTGAAATGAGACCGATTAT | 3175 |
| Hoxb8 | GCATAAcACAGCAGTAACCA | 3176 |
| Hoxb9 | GACTGTGTGTGTGCTCTCGG | 3177 |
| Hoxb9 | GGAGGCTAAGGAGGGAGTCA | 3178 |
| Hoxb9 | GGCCCTGGAACTAGAGTTTC | 3179 |
| Hoxb9 | GCAGCTGAGAGAGGCGAAAG | 3180 |
| Hoxb9 | GGATGGAAAGGAAGGTAACC | 3181 |
| Hoxb9 | GGAGCGAATGAATCATAGTT | 3182 |
| Hoxb9 | GCAAAGCCCGGGAGAGGAAT | 3183 |
| Hoxb9 | GCCCGACAGGGTAATTAAAG | 3184 |
| Haxb9 | GGGAGGACCAGCATACAGGG | 3185 |
| Hoxb9 | GTTAAGTATCTGTAGGTCCT | 3186 |
| Hoxc10 | GCCAGGCAGGGACAATAGGA | 3187 |
| Hoxc10 | GACTGTCCCAAGTCTGGTCT | 3188 |
| Hoxc10 | GAGAGCGCTTGTGTGGGTCC | 3189 |
| Hoxc10 | GCAGGAAGCATTTCTCCTGA | 3190 |
| Hoxc10 | GGACTGTCCCAAGTCTGGTC | 3191 |
| Hoxcl0 | GAAAGTGTAAGGTGAAGAGA | 3192 |
| Hoxc10 | GGTCTAGCCGTCACATGGTG | 3193 |
| Hoxc10 | GTGTTATTCAGGGCAAGGTT | 3194 |
| Hoxc10 | GTGGAGTGT6TGGCCAGCAG | 3195 |
| Hoxc10 | GAGTCTCCAGTGTCTGGAGT | 3196 |
| Hoxc11 | GTAATAGCCAAAGGGACTGG | 3197 |
| Hoxc11 | GGAAGTCTCTTCTACAATAT | 3198 |
| Hoxc11 | GCACAGCCTTGGAGAGAGGT | 3199 |
| Haxc11 | GCTAGACAAAGTTGGGACAC | 3200 |
| Hoxc11 | GCAAGGAGGGTTTATAGACT | 3201 |
| Hoxc11 | GGAGGAGAGAGAGAGAGGGT | 3202 |
| Hoxc11 | GACTTGGAGAAGGGCAGGGT | 3203 |
| Hoxc11 | GAGCACTTCGCAGACGTAGG | 3204 |
| Hoxc11 | GCAACAGAATCTTCTGTTTC | 3205 |
| Hoxc11 | GCTCTGATTCTTCAGGTAGA | 3206 |
| Hoxc12 | GAACATCTGCAAGTCAACAT | 3207 |
| Hoxc12 | GGCTAAGGGAGGGAACCAGG | 3208 |
| Hoxc12 | GGTGATAAGATAATACATCT | 3209 |
| Hoxc12 | GGAGATTAGCATTGTCGGAA | 3210 |
| Hoxc12 | GCGTCCIGTAGAGGAGAGAG | 3211 |
| Hoxc12 | GTGTTGCACAGAAGGAAGAG | 3212 |
| Hoxc12 | GAGAAATCCACGTCTGAAGA | 3213 |
| Hoxc12 | GGTTGCAGAGAGAATGAGAA | 3214 |
| Hoxc12 | GAAGGAGAACCGGCCAAGCG | 3215 |
| Hoxc12 | GAGATTACCCTACAACCTGC | 3216 |
| Hoxc13 | GACTACCGAAGTCTCTAAAT | 3217 |
| Hoxc13 | GTAATTACATCTCATTTCGG | 3218 |
| Hoxc13 | GTAGCAGGCACGGAAGGTCT | 3219 |
| Hoxc13 | GCTGCTGGAGTCCAAGGTCA | 3220 |
| Hoxc13 | GGTCTAGGATTAGTCTTGAT | 3221 |
| Hoxc13 | GCGTAGTGGGAATGCGGCTA | 3222 |
| Hoxc13 | GGCTCCGGTTCTCAAACAGA | 3223 |
| Hoxc13 | GTGATAAGCGCTAAGGAGCC | 3224 |
| Hoxc13 | GCTGTGGTCACGTGGGAACC | 3225 |
| Hoxc13 | GGGAGCTTGGCACAATTCCA | 3226 |
| Hoxc4 | GACTTGAGGATCCGTGAATG | 3227 |
| Hoxc4 | GAACTACAAGTTGCTGGAAG | 3228 |
| Hoxc4 | GGGAAGGACAGTGGGTAGCA | 3229 |
| Hoxc4 | GACAGGGTCCCAGCAGTACT | 3230 |
| Hoxc4 | GGGCTTCAGTGCAGGTTGGA | 3231 |
| Hoxc4 | GATGTCATTTCTGGAAGTCT | 3232 |
| Hoxc4 | GTGTGTGGGTGACAGAGGGA | 3233 |
| Hoxc4 | GGGAAAGCAGCCAGAGGCAC | 3234 |
| Hoxc4 | GCCCACACAGGCTTCCCTTG | 3235 |
| Hoxc5 | GCAGGAAGAAAGGCCCGCGT | 3236 |
| Hoxc5 | GATGACTGAGAAAGAGAGTT | 3237 |
| Hoxc5 | GAAGCTTGAGTGAGCCGGGT | 3238 |
| Hoxc5 | GGGAGGTTAGTGATGGAAGC | 3239 |
| Hoxc5 | GATGAGCAAGGGAGAAGAGA | 3240 |
| Hoxc5 | GCCTTCTAGCAGTCAGTTTG | 3241 |
| Hoxc5 | GGTCTCCTAGGCCTAGGCGA | 3242 |
| Hoxc5 | GAAGTCTACCCAAGTTCACC | 3243 |
| Hoxc5 | GAGACCTTGACCTTTAGTTT | 3244 |
| Hoxc5 | GCTCAGAAGCCGAAGATCCC | 3245 |
| Hoxc6 | GCTGTTGGAAACCTCTGCCC | 3246 |
| Hoxc6 | GCATCCCGAAAGAGGAAATT | 3247 |
| Hoxc6 | GAAATGGACTTTCTCCCTTT | 3248 |
| Hoxc6 | GTTTCCCTGGAGTGTCACTA | 3249 |
| Hoxc6 | GGACCCTCTTTCTACTGGGA | 3250 |
| Hoxc6 | GCCTTACAACTCAGGTCCAG | 3251 |
| Hoxc6 | GCAAGCCAGATGTCAAGAAA | 3252 |
| Hoxc6 | GAAACATGGTGCACAGAGGA | 3253 |
| Hoxc8 | GCTCTTTCCTCTAACAGCCC | 3254 |
| Hoxc8 | GTCATCAAAGAAAGAATGGC | 3255 |
| Hoxc8 | GGGTACATGATCACCATGCT | 3256 |
| Hoxc8 | GCTGACATTTCTGGCCAGAG | 3257 |
| Hoxc8 | GTGTGCTTCTAAGCCCAGGC | 3258 |
| Hoxc8 | GTTTGCAGGTTAGGCAAGGA | 3259 |
| Hoxc8 | GAGATGGGTCCTCACTCTAC | 3260 |
| Hoxc8 | GGTGGCCTCACATACTGTAG | 3261 |
| Hoxc8 | GAGGGTCCAGATCCTCTCTG | 3262 |
| Hoxc8 | GCTCAGTACAGAACTGAACA | 3263 |
| Hoxc9 | GTGACGTGAAGGCGGCAAAC | 3264 |
| Hoxc9 | GGCGAGACATCTCAGAGATC | 3265 |
| Hoxc9 | GCTTTGTGTGGGTCCTTGCT | 3266 |
| Hoxc9 | GAAGTGGAGCAAGGTCTCAT | 3267 |
| Hoxc9 | GTCTCAGACAGACAGGCAAG | 3268 |
| Hoxc9 | GTCCAGAGCAGGTTGTCCGC | 3269 |
| Hoxc9 | GGATTCTCTGAAACTCGGCA | 3270 |
| Hoxc9 | GATGATGGATTTAAAGGAGG | 3271 |
| Hoxc9 | GCACACAGCCAGTTTGGGTA | 3272 |
| Hoxc9 | GGTGAAGGAAGATATGTATA | 3273 |
| Hoxd1 | GAGCCCTGGACATCAGCTCC | 3274 |
| Hoxd1 | GAATGAAATGACCAGAGGTT | 3275 |
| Hoxd1 | GCTCCTGGGACAGGTATTGC | 3276 |
| Hoxd1 | GTTTATAATCATCTGAGGAG | 3277 |
| Hoxd1 | GGGCTCACTCCTGGACTATG | 3278 |
| Hoxd1 | GGCTAAGTTGGCAGCAAGGC | 3279 |
| Hoxd1 | GTGTGCTTAAGTATCTCCCA | 3280 |
| Hoxd1 | GTCCACCTCACTAGCATAAT | 3281 |
| Hoxd1 | GACCTTCTCAGAGGGAGGGC | 3282 |
| Hoxd1 | GGTATTGCGGGAGAAAGGCA | 3283 |
| Hoxd10 | GAAGGACGGCTCCCACACAC | 3284 |
| Hoxd10 | GTGGAGGCTCTGGGCCTAAG | 3285 |
| Hoxd10 | GGCCGGGAGAAATTCCTTTA | 3286 |
| Hoxd10 | GGAGAGACGCTTTCGCGAAT | 3287 |
| Hoxd10 | GGTGCTAATCAGTGGTTGTT | 3288 |
| Hoxd10 | GTCTTCCGTTTCCTCTGGTG | 3289 |
| Hoxd10 | GTCTCTGGGCCTGAAATCCA | 3290 |
| Hoxd10 | GGGCAAGAAGGGAATAAAGA | 3291 |
| Hoxd10 | GTGGTTGTTCTTTAATGAGC | 3292 |
| Hoxd10 | GGGCTGGTTAATTTAGTACT | 3293 |
| Hoxd11 | GAAGGGAGTGGTACTAAGCC | 3294 |
| Hoxd11 | GAGATTGCTCAGGGCTTAGT | 3295 |
| Hoxd11 | GATTTCTGTGGATCAGTAAA | 3296 |
| Hoxd11 | GCCATGTCGTTGAACTTGAA | 3297 |
| Hoxd11 | GAGAACCAACCGATCTCCCT | 3298 |
| Hoxd11 | GATGTTGTGCATCTTGCTAA | 3299 |
| Hoxd11 | GATAGGTGAGGCTGGAGCAG | 3300 |
| Hoxd11 | GCCAGCAGACTTCACTTTAG | 3301 |
| Hoxd11 | GGACTAGGTGTGAGAGTGTG | 3302 |
| Hoxd11 | GAAGCATTTCTCTCTCTACG | 3303 |
| Hoxd12 | GTTCAACTAACTTGCACATC | 3304 |
| Hoxd12 | GAACAGCGTGAAGATTCCTT | 3305 |
| Hoxd12 | GAGGGAAGGTGGGAGGAGGA | 3306 |
| Hoxd12 | GGAATGAAGTGGGTCGATTA | 3307 |
| Hoxd12 | GGGTCAGTTGCTACAACCTC | 3308 |
| Hoxd12 | GCAGCCTGCGAAATAAGGGC | 3309 |
| Hoxd12 | GAGCCAAAGCCTGTTGAGGG | 3310 |
| Hoxd12 | GGTCCTGCTTTAGGCTAGCG | 3311 |
| Hoxdl2 | GTGATGTGCTTCCCTTTCCA | 3312 |
| Hoxd13 | GTGAGCTCTGATTTGAATCT | 3313 |
| Hoxd13 | GTGGCTGCAAAGTCAACTCC | 3314 |
| Hoxd13 | GGATGAGCTGTCTCGAATTT | 3315 |
| Hoxd13 | GGGTGCGTGAGCCTCAAAGT | 3316 |
| Hoxd13 | GGTTAGTCAAGAGTGCTGGG | 3317 |
| Hoxd13 | GCTCTGATTTGAATCTAGGT | 3318 |
| Hoxd13 | GACTGCTGAGGCTGATTATG | 3319 |
| Hoxd13 | GGATTTGGAGTTCTACCTGT | 3320 |
| Hoxd13 | GTGTAGGTTATGAGAGGTAC | 3321 |
| Hoxd13 | GATTGCGCGACGGCCCATCT | 3322 |
| Hoxd3 | GGGCTGCTTAGTTCTGGGTC | 3323 |
| Hoxd3 | GAATTTACTGCAATTCCTTG | 3324 |
| Hoxd3 | GTCCTCTTTGGAGATACCGC | 3325 |
| Hoxd3 | GTTTCCAAATAAAGACCTTG | 3326 |
| Hoxd3 | GAAGTCCGATGGGTTGAGTG | 3327 |
| Hoxd3 | GGTTATCAGGATGCTCAAAC | 3328 |
| Hoxd3 | GGTTAGAGGGACAGGAAAGG | 3329 |
| Hoxd3 | GCCTTTCTGGAACAGGGCTA | 3330 |
| Hoxd3 | GGCTCTGGGAAAGCAGAATG | 3331 |
| Hoxd3 | GTGTCCATGGGRGAAAGGGC | 3332 |
| Hoxd4 | GGCGGTGATGGTACTCACAG | 3333 |
| Hoxd4 | GAGGCAATACCCAGTTTACT | 3334 |
| Hoxd4 | GATTGAAATAAAGGCGGTGA | 3335 |
| Hoxd4 | GGCTCTAGCTAAATGAGAAG | 3336 |
| Hoxd4 | GGATTTATGCTTAAGTACAC | 3337 |
| Hoxd4 | GTTCCTACTGGGAGTTGCAA | 3338 |
| Hoxd4 | GGAGTTGCAATGGCAGCGGA | 3339 |
| Hoxd4 | GCCTTCCTGCAGCATCTGTA | 3340 |
| Hoxd4 | GTGTACTTAAGCATAAATCC | 3341 |
| Hoxd4 | GAAGTGGGTTTGCAAATGGC | 3342 |
| Hoxd8 | GGGTGGCATTTCCTAGGGCA | 3343 |
| Hoxd8 | GTCCTCAAGATCAGAGAGCC | 3344 |
| Hoxd8 | GGGAAGAAGGAATCATGCCG | 3345 |
| Hoxd8 | GTGCTGAACCCTTTATCCTT | 3346 |
| Hoxd8 | GAATAGGTCTGGGAATGGAA | 3347 |
| Hoxd8 | GCCTCCGCCAGCCTTAAAGG | 3348 |
| Hoxd8 | GGAGCCGGAGAGGAAACTGG | 3349 |
| Hoxd8 | GTTTCCTCTCCGGCTCCAGG | 3350 |
| Hoxd8 | GCAGATTTGCACAGGTGCCA | 3351 |
| Hoxd8 | GGAGGCGAGAGAATGTGGGA | 3352 |
| Hoxd9 | GTTCCTTCTGCTTTCTGAAA | 3353 |
| Hoxd9 | GGGAAAGAGAAAGGGACTTG | 3354 |
| Hoxd9 | GGAGATCGCAGGACCCAGAG | 3355 |
| Hoxd9 | GTTATGAAGACTGAGCTCTC | 3356 |
| Hoxd9 | GTTGCTTGTTCCTGCAATGG | 3357 |
| Hoxd9 | GGAACCGCATCTCCGAGGGT | 3358 |
| Hoxd9 | GGAGCCGACAGTGATGGCCA | 3359 |
| Hoxd9 | GTTCTTACTTACCAGGCTCA | 3360 |
| Hoxd9 | GCAGTGGGTTCTTACTTACC | 3361 |
| Hoxd9 | GGTTCCTGCAGGCCTCTCTG | 3362 |
| Hsbp1 | GAAGGCGGAGCTAAGAACTG | 3363 |
| Hsbp1 | GTTTAGTAAAGGAGAGAAAC | 3364 |
| Hsbp1 | GAATTGTACAGGCACATGGA | 3365 |
| Hsbp1 | GGAACATGGAGAACTCTGGC | 3366 |
| Hsbp1 | GCGCCGAGAAACCGAAGTGT | 3367 |
| Hsbp1 | GTGTCCTAGGAAGGAAAGAG | 3368 |
| Hsbp1 | GTAATTCCCATCTCTGTGTT | 3369 |
| Hsbp2 | GGCGTAGCTTATCCGCAGGC | 3370 |
| Hsf1 | GCTTTCCGACTTGTCCGTCA | 3371 |
| Hsf1 | GGAGCTCAAATGTGTGACGA | 3372 |
| Hsf1 | GTGTCAGTTTCAGGACCCTT | 3373 |
| Hsf1 | GAAAGAGGAAGTGCCTGCCT | 3374 |
| Hsf1 | GCAGCGATGCCGGTGACATG | 3375 |
| Hsf1 | GGGTGAGGGACCAGCTTCCA | 3376 |
| Hsf1 | GGCTCTCCTGCACATGAGGA | 3377 |
| Hsf1 | GTCCACAGAGGCAGGAGAGG | 3378 |
| Hsf1 | GGTCTTGCCAAGTGCCTGCA | 3379 |
| Hsfl | GCTCTGATTGGTGAGCAGCC | 3380 |
| Hsf2 | GTGCATCCGAAGCCTTGGAT | 3381 |
| Hsf2 | GCAGAGTGCAGAGAAGCCCA | 3382 |
| Hsf2 | GCGAGTCCAATCCAAGGCTT | 3383 |
| Hsf2 | GGATTGGACTCGCTGAGACC | 3384 |
| Hsf2 | GCACTACAGAGCAAAGCGAT | 3385 |
| Hsf2 | GGATTCGCATGGAAAGGGTT | 3386 |
| Hsf2 | GTCTCAGCGAGTCCAATCCA | 3387 |
| Hsf2 | GATTCGCATGGAAAGGGTTT | 3388 |
| Hsf4 | GAATTTATGGTGCCTGAGAT | 3389 |
| Hsf4 | GCAGGTCGAGGTGGCGAAGT | 3390 |
| Hsf4 | GACTCGAGATCACAGGACGC | 3391 |
| Hsf4 | GGAAATACACAAAGGCTGGA | 3392 |
| Hsf4 | GACATTCAAGGAGACCTCAA | 3393 |
| Hsf4 | GCCTTTGTACTGTGACTGTG | 3394 |
| Hsf4 | GACACATTGAAGCCTAGGTA | 3395 |
| Hsf4 | GGCCTTTGTACTGTGACTGT | 3396 |
| Hsf4 | GGGCCTTTGTACTGTGACTG | 3397 |
| Hsp90ab1 | GAAGGTCTCTGTGAATAATG | 3398 |
| Hsp90ab1 | GCTGACCTGGATCGGTCACA | 3399 |
| Hsp90ab1 | GGTCGTTCAACCCTGGCCCA | 3400 |
| Hsp90ab1 | GATCTGCTACCATGACGTCA | 3401 |
| Hsp90ab1 | GCAGGCCACCTTTAGAACAG | 3402 |
| Hsp90ab1 | GGACTGAAAGAGAATGGAGG | 3403 |
| Hsp90ab1 | GGAGCATGCATATGCAATTA | 3404 |
| Hsp90ab1 | GAGAGGCTAACAGACAGTGC | 3405 |
| Hsp90ab1 | GGCCTCCTTAAAGTTGGACA | 3406 |
| Hsp90ab1 | GTACAGCACAGCTTCAGGCT | 3407 |
| Id1 | GAGTGTGAGGAGCTGAGGAG | 3408 |
| Id1 | GACGCTGACACAGACCAGCC | 3409 |
| Id1 | GAACGTTCTGAACCCGCCCT | 3410 |
| Id1 | GGTCTCTTTCTCACTTCTCC | 3411 |
| Id1 | GCGAAGGAATCCAACTCAGC | 3412 |
| Id1 | GGCTCAAGAACTGAAAGGGT | 3413 |
| Id1 | GCATAGGTAGAGCAGCTAGT | 3414 |
| Id1 | GATCCAGAGGTGGGACCCAG | 3415 |
| Id1 | GGCTCAGACCGTTAGACGCC | 3416 |
| Id1 | GACCAGCCCGGGAAAGGAAA | 3417 |
| Id2 | GACGTGCCCAGCTGCAGTAA | 3418 |
| Id2 | GTCTTAAGTTTCGAGTGATT | 3419 |
| Id2 | GTAACCCTGCCTCATTCTTG | 3420 |
| Id2 | GGGTGGTGGGAAGGTGTGAA | 3421 |
| Id2 | GGGCATCCCTGAATTGCCAT | 3422 |
| Id2 | GCAGCCAATGCCTGTAGGGT | 3423 |
| Id2 | GCCTCCTTAGAGAGAAGCCC | 3424 |
| Id2 | GATCCCGCCCTTACTGCAGC | 3425 |
| Id2 | GCCTCATTACCCCAACAGAA | 3426 |
| Id2 | GCTCATTATCATCCAGCCCA | 3427 |
| Id3 | GCTGATACCGAGGAGAGGCG | 3428 |
| Id3 | GCTGATACCGAGGAGAGGCG | 3429 |
| Id3 | GCTTTCTTAATCAATCAGCC | 3430 |
| Id3 | GCTTACCTGTGATGTGATAC | 3431 |
| Id3 | GGCGTGGAAAGGACTGAATG | 3432 |
| Id3 | GTGCAAAGTGTGCAAAGGGA | 4433 |
| Id3 | GTTCTATGTATGCCCGTGGA | 3434 |
| Id3 | GCAGGCAAGAGAGAGTCTTT | 3435 |
| Id3 | GAACGCATGACGTCCCACCC | 3436 |
| Id3 | GAGTGTGCAAAGTGTGCAAA | 3437 |
| Id4 | GTTACATCCATCTATGAAAC | 3438 |
| Id4 | GGGAATGACGCTCGGGCCAA | 3439 |
| Id4 | GGGACTCTGAGCCTTGTTTG | 3440 |
| Id4 | GGTGGCACTGTCCTCCTGAT | 3441 |
| Id4 | GAGCTTAAAGGTAGCAGTAT | 3442 |
| Id4 | GCCTTCTCTATAGACAGCGT | 3443 |
| Id4 | GAGGAGCATGAAGCCCATCC | 3444 |
| Id4 | GCCTTCTGACCCTCCAAAGG | 3445 |
| Id4 | GCCTCTAAGGATTTAGAGGG | 3446 |
| Id4 | GACGCTCGGGCCAATGGGAA | 3447 |
| Ikzf1 | GGAAGGCTCTGGGCCTCAAA | 3448 |
| Ikzf1 | GTGCACACGCCAGCGTGGAA | 3449 |
| Ikzf1 | GCTAGACTGGTGGTAAGGAA | 3450 |
| Ikzf1 | GCTCAGGGTTAACGCCTGTC | 3451 |
| Ikzf1 | GAGGAGTGAGCCACAGGGAC | 3452 |
| Ikzf1 | GCGCCAACCCAAAGTTTGCA | 3453 |
| Ikzf1 | GGCTGCAAAGTTTGTGTGCG | 3454 |
| Ikzf1 | GGGCTTTCTGATATCATCTT | 3455 |
| Ikzf1 | GCTGGTGGAAAGGAAGACAC | 3456 |
| Ikzf2 | GTTGGCCTAGGTTCCTTGCT | 3457 |
| Ikzf2 | GGCAGTGGATCTGTAGCTAA | 3458 |
| Ikzf2 | GGTTATCCAATCTTTCTTCT | 3459 |
| Ikzf2 | GGGAAGTTCTCTCTCTGGCC | 3460 |
| Ikzf2 | GCTCCGCCGGATCGGTTTCT | 3461 |
| Ikzf2 | GCCACATCCACCCGAGTCAA | 3462 |
| Ikzf2 | GTCGATTCTTAAGGAACCGG | 3463 |
| Ikzf2 | GCAGTGCACAAACACACGTT | 3464 |
| Ikzf2 | GGTTTCTCAGAAATGTTGTT | 3465 |
| Ikzf2 | GAGGATCTGGGACACTGAGC | 3466 |
| Ikzf3 | GTCAGATGACAAGGTTTGTC | 3467 |
| Ikzf3 | GCACTAGTTAATGTGAGCTC | 3468 |
| Ikzf3 | GCATTTCTAACGATGCCAAC | 3469 |
| Ikzf3 | GAGGAACTGTACACTTTCAC | 3470 |
| Ikzf3 | GGGTAGAGGGACTAAGTCAA | 3471 |
| Ikzf3 | GTTCCAGGTCCTTCCGTGTC | 3472 |
| Ikzf3 | GAAAGCATTTGACAGGAGGG | 3473 |
| Ikzf3 | GACGTCTACTTGAGAAACAC | 3474 |
| Il6 | GAGAAAGCCTCTTCCAGATG | 3475 |
| Il6 | GAAAGCACACGGCAGGGAAT | 3476 |
| Il6 | GCAGAGAATAGGCTTGGACT | 3477 |
| Il6 | GAACTCTTGTCAGCCTCATC | 3478 |
| Il6 | GAAGCCCTGGTCTTCACAAA | 3479 |
| Il6 | GAGAATGCAGAGAATAGGCT | 3480 |
| Il6 | GTGAAGACCAGGGCTTCACA | 3481 |
| Il6 | GTAACCCAGTGTAAACACAC | 3482 |
| Il6 | GGTCATGCAAGGAGGCTTGA | 3483 |
| Il6 | GTCTGTAGCTCATTCTGCTC | 3484 |
| Ilf2 | GTGAATGGTAAGCTCTTCTA | 3485 |
| Ilf2 | GGAGTAGATCCTAAGGACCC | 3486 |
| Ilf2 | GGCTTCTTTCACTTGTCCCA | 3487 |
| Ilf2 | GACTCACCTGGACTTGGCTG | 3488 |
| Ilf2 | GAACAGGTAGAAGACTCACC | 3489 |
| Ilf2 | GAGGGAATAGTGGTGGTAAG | 3490 |
| Ilf2 | GCCAATAAGAAGACATAACA | 3491 |
| Ilf2 | GTGAGTCTTCTACCTGTTCC | 3492 |
| Ilf3 | GGTGGATCGCCCACGTGATG | 3493 |
| Ilf3 | GGTCCGGAGCTCTTCATATC | 3494 |
| Ilf3 | GGGAACACCGGCAAGGTAAG | 3495 |
| Ilf3 | GCACATGCGGTTGTCAACAC | 3496 |
| Ilf3 | GCCAAGAGGACGCTAGTGAC | 3497 |
| Ilf3 | GTGGATCGCCCACGTGATGC | 3498 |
| Ilf3 | GATGGAAGAGCCGAGCGAAG | 3499 |
| Ilf3 | GATATGAAGAGCTCCGGACC | 3500 |
| Ilf3 | GACCTGAGGTGCTTCTGATC | 3501 |
| Insm1 | GCCTGTGGAGTTGACCCAAG | 3502 |
| Insm1 | GGCTCCCTCTGAGGACAGAT | 3503 |
| Insm1 | GGTGTCCACTTGGGACACTT | 3504 |
| Insm1 | GGACCGCAGCTGCATCCATA | 3505 |
| Insm1 | GGGTGAGCTTTGCTCTTCTC | 3506 |
| Insm1 | GAAGGAGGAGACCCACAGGT | 3507 |
| Insm1 | GACAGGGACGCGTCCATGAA | 3508 |
| Insm1 | GTACATCTGCCGCACCTACC | 3509 |
| Insm1 | GAGCAGCAGACCGTGAAGGG | 3510 |
| Irf1 | GTTCTAGCTAGCGGTGACCA | 3511 |
| Irf1 | GAGCGATTCGCAGAGGGTGC | 3512 |
| Irf1 | GACGAAGGAGTGGTGCGCAC | 3513 |
| Irf1 | GCTGGGAGTCTGCAGAAAGA | 3514 |
| Irf1 | GCTTTCAGTAGGGTCTCTGT | 3515 |
| Irf1 | GCACGGGACACCAGGAAGTG | 3516 |
| Irf1 | GCGAAAGATGCCCGAGATGC | 3517 |
| Irf1 | GAGACACTCTGACCAGCCAA | 3518 |
| Irf2 | GCAGGTGTAACTAAATGTAA | 3519 |
| Irf2 | GAACTTCCGCACCTCCAGGC | 3520 |
| Irf2 | GTTCTGAGCACTTAAGCCAC | 3521 |
| Irf2 | GTCTTCTCTTCCCTAGAACA | 3522 |
| Irf2 | GATTCCACAGACAGGGATAA | 3523 |
| Irf2 | GTGGTGGCCGTAGGGAAGGA | 3524 |
| Irf2 | GCCTTTCCTCTCCCTGTTCT | 3525 |
| Irf2 | GCTAGACCGTGTGGGAAAGA | 3526 |
| Irf2 | GCAGGAACGTTGTTAGTTCC | 3527 |
| Irf3 | GAACTCACCTGGGTGGAGTT | 3528 |
| Irf3 | GGTGCTTGGAAGTCACAGCT | 3529 |
| Irf3 | GGTGTGACAAAGACTTGAAA | 3530 |
| Irf3 | GGTCACTTGTGAAACTTTCA | 3531 |
| Irf3 | GTCAGATTACCAACTGGCCA | 3532 |
| Irf3 | GAAGAGGGCGCCTAACTCCA | 3533 |
| Irf3 | GATCTTCCATGAAAGGATGA | 3534 |
| Irf3 | GTTCCCAGCATGCCTGTAGG | 3535 |
| Irf3 | GAGCAATTCCGTGGTTGACC | 3536 |
| Irf3 | GAGACCCAACTCTTCAGAGC | 3537 |
| Irf4 | GTGGTTGTCAGGGCTCACAG | 3538 |
| Irf4 | GAAGTGATAGTTTAACAGTG | 3539 |
| Irf4 | GTTGCCATGATTGAAACTTT | 3540 |
| Irf4 | GAAACAAGGTCTCCGTCTCT | 3541 |
| Irf4 | GGCAGACTGGTTAAAGACAT | 3542 |
| Irf4 | GAACTTTATAGACCGGGAGG | 3543 |
| Irf4 | GTTCTTAGTGGTCAGCTAGA | 3544 |
| Irf4 | GGAGGAGCTGAAGAAAGCCA | 3545 |
| Irf4 | GCTTCGGACTAGAGCCCACC | 3546 |
| Irf4 | GGTATGCTGTTTGCAAGGAA | 3547 |
| Irf5 | GCAATTGTGAACTGGCAGGC | 3548 |
| Irf5 | GGCAGGAGGGAGCTTCTGTG | 3549 |
| Irf5 | GATCTCTGAGTTGTCCCATC | 3550 |
| Irf5 | GCTTTGCAGGTTCTCTGGAC | 3551 |
| Irf5 | GAAGGCCCGTTTATGGAACC | 3552 |
| Irf5 | GAGCTGTGTGCCGACAGGGT | 3553 |
| Irf5 | GTCGATGGAGCCACACTCCA | 3554 |
| Irf5 | GTTGCCTTGAACTGGGTGTG | 3555 |
| Irf5 | GCTAGCTAAAGTGAACAATG | 3556 |
| Irf5 | GGACCAGAAAGGATGTGGAC | 3557 |
| Irf6 | GTGACATCCCAAACTGAGCT | 3558 |
| Irf6 | GTGCAGGGTCACTACGGGAG | 3559 |
| Irf6 | GGACATTTGCTTGGTTTCAA | 3560 |
| Irf6 | GGGAAAGCTCAGGTCTTCCC | 3561 |
| Irf6 | GATGTCACCGGGCAAAGGCT | 3562 |
| Irf6 | GTGGCACTTGTCAGGCACAC | 3563 |
| Irf6 | GTGTTGTGATCGACTGAGGG | 3564 |
| Irf6 | GTCCACCACTCAGGAGACTG | 3565 |
| Irf6 | GAAGGGTTTGCCTCACTGCC | 3566 |
| Irf7 | GGCTGCTTTGGCAATGAACA | 3567 |
| Irf7 | GAATTCCAGAGTCTTAAGGC | 3568 |
| Irf7 | GCTTTCCTCTTAGCTACAGT | 3569 |
| Irf7 | GAACGTGCGTGTGGAGTGGA | 3570 |
| Irf7 | GACAGCTTCACGTGAGGGAG | 3571 |
| Irf7 | GTGGGTAGACCTTTAGGGAA | 3572 |
| Irf7 | GCCAGTGCCTCGGGAAGTGA | 3573 |
| Irf7 | GCATGCCATGACTGCTGTTC | 3574 |
| Irf7 | GTGTGTAACTACCGTAGCCC | 3575 |
| Irf7 | GGTGTTTGGGACCCTCATGA | 3576 |
| Irf8 | GAGCACCGATTCTCCTCAGA | 3577 |
| Irf8 | GCGCGAGCTAATTGAGGAGC | 3578 |
| Irf8 | GGGAGAGGTGTTTGTTCATT | 3579 |
| Irf8 | GCAGGAAATCTGGGAAACCA | 3580 |
| Irf8 | GCATGTGCAGGGCTTAACTA | 3581 |
| Irf8 | GGAAACCCTGACCTCAGCAG | 3582 |
| Irf8 | GCCTGAGCAGCTGACACTCA | 3583 |
| Irf8 | GGCCTCTAAGGATGAGGGTG | 3584 |
| Irf8 | GTGGCCCAGGGCTGAATGAA | 3585 |
| Irf9 | GAAGGACCACCAAGAAGCCT | 3586 |
| Irf9 | GTGAACATATGCAAGATGGA | 3587 |
| Irf9 | GCAGTAAGCTGAGGTCTCTG | 3588 |
| Irf9 | GGCAGTAAGCTGAGGTCTCT | 3589 |
| Irf9 | GGCAACACGGCTTAGTCATT | 3590 |
| Irf9 | GGAGAATTGAAACTTAGGGT | 3591 |
| Irf9 | GAGAATTGAAACTTAGGGTG | 3592 |
| Irf9 | GATGGGCAATAGCTCCCTGC | 3593 |
| Irf9 | GCCATAAGATGCCTCTTTAT | 3594 |
| Irf9 | GGGTTCAGGGATGAAGCTTG | 3595 |
| Irx1 | GTCGTGGGAGACTCAAAGAC | 3596 |
| Irx1 | GGGATTGCGTTTCTACAGCT | 3597 |
| Irx1 | GTGGACTCCCTGGTCAGGTC | 3598 |
| Irx1 | GCAAGGGTGTGGACTCAGTT | 3599 |
| Irx1 | GGCCTGGCTGCTCTGTTCTC | 3600 |
| Irx1 | GAGGAGAGCTCCTAGAGGGT | 3601 |
| Irx1 | GCTGAGAGGTCGCTGCCTAG | 3602 |
| Irx1 | GTTTACAGCTGTCTGACACC | 3603 |
| Irx1 | GCAAGCAAGTGTGCCTTAGC | 3604 |
| Irx1 | GTTGTGGGAGTAATGACAAG | 3605 |
| Irx2 | GGACTCTGAAACCTGGCGCG | 3606 |
| Irx2 | GGGTAGATGCTTGGCAGCCC | 3607 |
| Irx2 | GCTTCAAGGAGACACCTGTT | 3608 |
| Irx2 | GCTCTACCTAGCAAGCTTCA | 3609 |
| Irx2 | GTTGGAAACCAAGAGCAGTT | 3610 |
| Irx2 | GTCACGGATCTGGCTGCTGC | 3611 |
| Irx2 | GCTCTGAAGCTAGTAGAGGG | 3612 |
| Irx2 | GTCCAGGTCCCAGGGAACCA | 3613 |
| Irx2 | GCTATCTTCAGGGTGATGAG | 3614 |
| Irx2 | GCCTCAGCCGOGAGTACAGG | 3615 |
| Irx3 | GAAAGTCATACTGAAATTCC | 3616 |
| Irx3 | GAACGTGCTGCCTGGGAGTT | 3617 |
| Irx3 | GGGTTCGATGTCAGCATGTG | 3618 |
| Irx3 | GGTGCATCGGGAGTTGATTG | 3619 |
| Irx3 | GGTTGGCTTTAAGGTGAGCC | 3620 |
| Irx3 | GTGCCTGTTGGGAGAAAGAG | 3621 |
| Irx3 | GGCGACAGAGCCAGATTGCA | 3622 |
| Irx3 | GCTTTGTGCACTGTGCCTGT | 3623 |
| Irx3 | GGAATGGATTTCTTTCTCCC | 3624 |
| Irx3 | GCTACTTATCAGAACTTTGC | 3625 |
| Irx4 | GAAGCTAAGGCTCACGGGAG | 3626 |
| Irx4 | GACTCATTTCATGCTCACCG | 3627 |
| Irx4 | GCTCTGGAGCCTTCCATGGG | 3628 |
| Irx4 | GGGAAGCTGCCTTGCACAGT | 3629 |
| Irx4 | GGAGTCTTCAAGGGAGCGAA | 3630 |
| Irx4 | GCAAAGTCCAGGTGAGGAGG | 3631 |
| Irx4 | GATGGTCCGGAAGGGAGAAG | 3632 |
| Irx4 | GCCCTCACAATGCTATCCTT | 3633 |
| Irx4 | GCCTGGGTCTTTGTAATCTG | 3634 |
| Irx4 | GAGTAAGCTCCCGCCCAGAA | 3635 |
| Irx5 | GGCAAAGCTTGATCATTAGC | 3636 |
| Irx5 | GGGATGTGATTGTCATCCTG | 3637 |
| Irx5 | GGGCCGTTCGGGAACACAAA | 3638 |
| Irx5 | GATTACGTCATCCAGAGGAG | 3639 |
| Irx5 | GCAAGCAGTTTGCTCGGTTG | 3640 |
| Irx5 | GCCTCTTCTCGTCGTCTGCC | 3641 |
| Irx5 | GAAGCCACTGTGGAGCGTGG | 3642 |
| Irx5 | GTGTTCCGAGAACTCTGCCT | 3643 |
| Irx5 | GCCTCTCGGGCTGACCATTC | 3644 |
| Irx5 | GTCAGGTCTGTGGAGCCGGA | 3645 |
| Irx6 | GGCTGCACCTCGATCTGGAG | 3646 |
| Irx6 | GGCCAGGTCCTTGACCTCTT | 3647 |
| Irx6 | GCGTTCTCTGTGGTCCAAAC | 3648 |
| Irx6 | GATTCATTAAGTTAGTCCCT | 3649 |
| Irx6 | GAAGGAGTTTATTACACCAT | 3650 |
| Irx6 | GACAGGGCGACTGAAAGGTA | 3651 |
| Irx6 | GTCCCGGGAGCTCTTAGGGT | 3652 |
| Irx6 | GCTGCACCTCGATCTGGAGG | 3653 |
| Irx6 | GATTCTAACAACCAAGCGCC | 3654 |
| Isl1 | GAACTCAGTAATAGTAGGAT | 3655 |
| Isl1 | GTAGCATGCCCTTGTACGGA | 3656 |
| Isl1 | GTAGGTCCTTCCTGTGAAGC | 3657 |
| Isl1 | GCTTTCTAATTTGTTTCCTC | 3658 |
| Isl1 | GTCAACCTGGCTCTATAGAA | 3659 |
| Isl1 | GAATCTTATATAGGTGAGGG | 3660 |
| Isl1 | GCTCTCTGACATCCTATGTG | 3661 |
| Isl1 | GTTCCTCCTGAGCTCCCTGC | 3662 |
| Isl1 | GGGAGGAAAGGAACCAACCT | 3663 |
| Isl1 | GGGAACTGCTTCTCTGGGCT | 3664 |
| Isl2 | GGTGGGCCTGAGCCTTTGTT | 3665 |
| Isl2 | GTCCAGTGCTGGCATGAGAG | 3666 |
| Isl2 | GCCCGAGATCTATCTAATTC | 3667 |
| Isl2 | GGAAAGCCCTGGAGAAAGCC | 3668 |
| Isl2 | GTAATTTACCGTCTTCCCGG | 3669 |
| Isl2 | GAGAGGAGAAAGGAGAGGGT | 3670 |
| Isl2 | GAGATTGGCTGGGAGGAAGT | 3671 |
| Isl2 | GGCTTTCTCTAGGTAGGAGA | 3672 |
| Isl2 | GACGAGCTCTCTGTCATACA | 3673 |
| Isl2 | GCTCCCAGCAAGGGCAAGAA | 3674 |
| Isx | GGAGTGACAGGAGGAATTTA | 3675 |
| Isx | GTGTAACCAAGGAGGAGGGT | 3676 |
| Isx | GAGGTTTATAGGGTGAACCT | 3677 |
| Isx | GGTGTTGGGTGGAGAGCTGA | 3678 |
| Isx | GCTGTCTTGAAGACAGTAAA | 3679 |
| Isx | GCTCCAAGCCCAGAGTTTAC | 3680 |
| Isx | GAGCCTCACCCATCACACCC | 3681 |
| Isx | GTCTTACTAGTACAAATCCA | 3682 |
| Isx | GAAACCGAGGCTCAGAACAA | 3683 |
| Jun | GAGAATAAAGTGTTGTGCCG | 3684 |
| Jun | GTTTGGCTGTCTAGTGACGG | 3685 |
| Jun | GATATGACTCCACCAGTGAG | 3686 |
| Jun | GTAAGTGCGTTGAAGTTGAG | 3687 |
| Jun | GAGGAACTCGGTTTCCATTT | 3688 |
| Jun | GGGCTGCGGAGAGAGGAACT | 3689 |
| Jun | GAGGTTTGCTTGGCGAGGGA | 3690 |
| Jun | GCTGGAAGCTCAGTTGGGAA | 3691 |
| Jun | GCAAGCCAATGGGAAAGCCT | 3692 |
| Jun | GCAAATCAGGGAGGGAGGAA | 3693 |
| Junb | GTGTCTGCAGGAGACTAACC | 3694 |
| Junb | GGACTGTTCCATTGGCCGGC | 3695 |
| Junb | GGTAATCGGAGTAGAAAGAT | 3696 |
| Junb | GCTAGGCCAAAGCCAAGTCC | 3697 |
| Junb | GAAGAGAAGAGTGGGAGGCT | 3698 |
| Junb | GGTCTCTGGTAAGATAAAGG | 3699 |
| Junb | GGTGAGTCAGTGTGGTCTCC | 3700 |
| Junb | GGAAAGGGCCAAGACACAAC | 3701 |
| Junb | GGTGACTAAGGGAGGGCTTT | 3702 |
| Junb | GTAAACAGCGGCCACGAGCC | 3703 |
| Jund | GGAGCCTGCAAATGAGAATC | 3704 |
| Jund | GGCAACAACTGGTCAAGGCT | 3705 |
| Jund | GCGAAGGTCCTGAGGTGCAA | 3706 |
| Jund | GCTCCTGCTGATGGAAGTTC | 3707 |
| Jund | GGTGCAAAGGAGCTCCAATG | 3708 |
| Jund | GAGTGTGAGGGCAGAGCTTG | 3709 |
| Jund | GCTGGGAACGGAGGTGGAAG | 3710 |
| Jund | GGATCTCTCACCTTCCAGCT | 3711 |
| Jund | GCATACTGTACTAATTAAGA | 3712 |
| Jund | GCAACCAAGTTTCCAAATAA | 3713 |
| Kat2a | GCTGTTGGTAGTTCTGATGG | 3714 |
| Kat2a | GTGTCTGAAGTGACCTGTGA | 3715 |
| Kat2a | GACCATCAGCTGATTCTGAA | 3716 |
| Kat2a | GGCCAGAATCTGACGGTGAC | 3717 |
| Kat2a | GCCCTTCTGGATGGGAAGAG | 3718 |
| Kat2a | GTGACAATTACTATCCTCTT | 3719 |
| Kat2a | GCCTGATCAGCTGCCAGAGA | 3720 |
| Kat2a | GCCTGCCCTATTGTGGCTGC | 3721 |
| Kat2b | GGGTGGTATGCTTATGCTCT | 3722 |
| Kat2b | GGAAGACCAAGAATGAGCAA | 3723 |
| Ktt2b | GTTTGCAGAGTGAATGCTGA | 3724 |
| Kat2b | GCATTCACTCTGCAAACATT | 3725 |
| Kat2b | GTGGAAGTAAACAGGAGTGA | 3726 |
| Kat2b | GAGTCATCTCCCTCCCTCTC | 3727 |
| Kat2b | GAACCGAATATGACCAGAGA | 3728 |
| Kat2b | GTATCTCATGGAAGAATTCC | 3729 |
| Kat2b | GAGGAGGATTGGCCGCTGAC | 3730 |
| Kin | GTTGTATATTAGAATGCCCA | 3731 |
| Kin | GGCGCTCCAGCACTGAACTA | 3732 |
| Kin | GGGAGCAGCGTGACCCTTTA | 3733 |
| Kin | GCCTTGAAGGTCGGGCAGAC | 3734 |
| Kin | GGTGCTAGAGACTCACCTCA | 3735 |
| Kin | GTGAACCTCTCGAGCCTTTA | 3736 |
| Kin | GTTTCTGTACCAGCCTCCAG | 3737 |
| Kin | GTGTTCACTAGTTAGCTAGT | 3738 |
| Klf1 | GCCTAACGGCTCATTGTGTG | 3739 |
| Klf1 | GACCCTCACTGGCTACTGCA | 3740 |
| Klf1 | GTGCCCTATGAGTCAGGGTA | 3741 |
| Klf1 | GGGTGCTGGTGGTTGTCTAG | 3742 |
| Klf1 | GGCTACTGCAIGGAGCTGAA | 3743 |
| Klf1 | GGTGCCCTATGAGTCAGGGT | 3744 |
| Klf1 | GATAATGCCTGAAAGGGAGC | 3745 |
| Klf1 | GGGTGTGTGCGATATGTGTG | 3746 |
| Klf1 | GTCTGGGTGGCTAAATAGAC | 3747 |
| Klf10 | GAGTGATCACAGCAGGAAAG | 3748 |
| Klf10 | GGGTAGGAGAAACTGGGTAG | 3749 |
| Klf10 | GAAGGACAGTGCTTATTGAA | 3750 |
| Klf10 | GTACCAAAGAGCTAGTGGCG | 3751 |
| Klf10 | GCGGTTTCTTGGTAGGGCGT | 3752 |
| Klf10 | GGAGAACCAGGGCGAGATGG | 3753 |
| Klf10 | GGAGGACTGAAGGCTAGGGT | 3754 |
| Klf10 | GGGCGGAGGACTGAAGGCTA | 3755 |
| Klf12 | GATTTGACCATCTCTTGCCG | 3756 |
| Klf12 | GAGTCACATTGATCCTGCAA | 3757 |
| Klf12 | GGCTGTATAGCTCTTCACCA | 3758 |
| Klf12 | GAAAGTTGCAGGTCATGTTA | 3759 |
| Klf12 | GCAATCAGCTCTAACTTCTT | 3760 |
| Klf12 | GGAGTAGGGAAATGCAAGCC | 3761 |
| Klf12 | GCTGTATAGCTCTTCACCAA | 3762 |
| Klf12 | GGGAAGCCACCTGACGATGG | 3763 |
| Klf13 | GAGAGGGTTCTACTGGCCGC | 3764 |
| Klf13 | GGATATTTCTATCTGGGTTT | 3765 |
| Klf13 | GGTGAGGAGGTGGCTGGAGA | 3766 |
| Klf13 | GTGTGTTAAGATTGGTTCAA | 3767 |
| Klf13 | GTTTGAAGCCTCCAGGACCG | 3768 |
| Klf13 | GCCACAGACAGTCATCTCAT | 3769 |
| Klf13 | GATAGAGACAGTCTCTCCTC | 3770 |
| Klf13 | GGTGGCGTATCGGTCCCTAT | 3771 |
| Klf13 | GTCTAGACTTTAGAGCAAGG | 3772 |
| K1f13 | GCCACCAGAGAACTCCGCTG | 3773 |
| Klf16 | GGTGCTCTGCTGGTACACGA | 3774 |
| Klf16 | GGTGGCAGAGGTCCTTGCTC | 3775 |
| Klf16 | GTGCTCTGCTGGTACACGAG | 3776 |
| Klf16 | GAAGCTGAACCAGGCTTCAT | 3777 |
| Klf16 | GGGCTGCTACATGCAATGGC | 3778 |
| Klf16 | GGAACCCAAAGTTCTCAACG | 3779 |
| Klf16 | GGAGCGATTGGAAACTTCCA | 3780 |
| Klf16 | GACCTCTGCACAAATCTAGC | 3781 |
| Klf16 | GGGACCATCATTTCACAACT | 3782 |
| Klf16 | GCCTTGGGAGGTGACGATCC | 3783 |
| Klf2 | GAGGAAGTATGTGGTGAGCC | 3784 |
| Klf2 | GCTGGCTCAGTGCTTAAGAG | 3785 |
| Klf2 | GAGGGTAATAGAGAGAGGGA | 3786 |
| Klf2 | GCACTAGAAGGATTTATGTG | 3787 |
| Klf2 | GTATGTTTGTGGGAGGTGAA | 3788 |
| Klf2 | GCAAGAGGGTAATAGAGAGA | 3789 |
| Klf2 | GCGGTATATAAGCCTGGCGG | 3790 |
| Klf2 | GGCGACGGCGTCAACAAACC | 3791 |
| Klf2 | GACGGAAACGCGTCCCGGAT | 3792 |
| Klf3 | GTTTCTTGGGTGACTCAGTT | 3793 |
| K1f3 | GACGTAGGGACAGGGCATCC | 3794 |
| Klf3 | GTGGCCTCACGCAGCCTTTC | 3795 |
| Klf3 | GACCTTTCTATCTGTACCGA | 3796 |
| Klf3 | GCCTGGGCTGTTTAGGAAGC | 3797 |
| Klf3 | GATGCCCTGTCCCTACGTCG | 3798 |
| Klf3 | GAATGAATGGTAAGAGGGTA | 3799 |
| Klf3 | GAGGATTTAGATAAGCCGGA | 3800 |
| Klf3 | GAACAGGACATTCGTCATGA | 3801 |
| Klf3 | GCTTGGTGCTAGGCTAGAGT | 3802 |
| Klf4 | GGATGACTGCCCAGCTGTGG | 3803 |
| Klf4 | GGCGTTCCAGATTTACATTG | 3804 |
| Klf4 | GAAAGGGATGAGTTGTGAGC | 3805 |
| Klf4 | GGGACCCTAGTGCTCCAAAG | 3806 |
| Klf4 | GGCAGTAGCCAGAGCTAGGG | 3807 |
| Klf4 | GTGCGTATGCGAGAGAGGGC | 3808 |
| Klf4 | GCAGTTGGCAGATGATGTAA | 3809 |
| Klf4 | GATAATGGAAGGAACAAGGA | 3810 |
| Klf4 | GAATCTCAGAAGCTAGGAGA | 3811 |
| Klf4 | GACAAGCGCGTACGCGAGCA | 3812 |
| Klf5 | GTGCTCAAATAACTCTGAGA | 3813 |
| Klf5 | GTCAACAGCGGTGTTTGTCT | 3814 |
| Klf5 | GTAATTTCTGGCATAGAGAT | 3815 |
| Klf5 | GGGCTGCAATCCTCTTTCTG | 3816 |
| Klf5 | GTGAATGTTTGTGCCTTCTT | 3817 |
| Klf5 | GCGGGTGGAATCTAGGAAGA | 3818 |
| Klf5 | GTGCAGCCAGCCAGTGTGAA | 3819 |
| Klf5 | GAGAGGAGCGGGTGGAATCT | 3820 |
| Klf5 | GGCTAGGAGGGTAAGCATAG | 3821 |
| Klf5 | GGAAGGTGAGTGGTTTGGTT | 3822 |
| Klf7 | GTCCTCTCCGAGTGCCGCAT | 3823 |
| Klf7 | GCAAATGGCAGTAAAGGCCT | 3824 |
| Klf7 | GTTTGGTGGAACCCACACTC | 3825 |
| Klf7 | GTGACCATGTAAGGTAAACA | 3826 |
| Klf7 | GTACCCAGTGCAGATCCGAG | 3827 |
| Klf7 | GTAACTTCATGGAGCAGGTA | 3828 |
| Klf7 | GACCATGTAAGGTAAACAGG | 3829 |
| Klf7 | GGCACTCGGAGAGGACCATG | 3830 |
| Klf7 | GACCATGAATTTGAGAGGGA | 3831 |
| Klf7 | GATCTCCCTGCTGCCTTACA | 3832 |
| Klf9 | GAGAGGTGCGTCTAGAACTA | 3833 |
| Klf9 | GAAGGGCCCTTCTGACTGGC | 3834 |
| Klf9 | GGATGGGCGTAACTGCCTAG | 3835 |
| Klf9 | GGGCCTGGATTGTGACGTGA | 3836 |
| Klf9 | GGGATGGGCGTAACTGCCTA | 3837 |
| Klf9 | GGCTCCTCTAAAGCAGAGTT | 3838 |
| Klf9 | GCACTCCTCCCTGTTCCTGC | 3839 |
| Klf9 | GGCTACCAAAGATTAAGGGC | 3840 |
| Lbx1 | GGCAGAAATGCTGATAGTAG | 3841 |
| Lbx1 | GATCCTCCCTATAGGCAGAG | 3842 |
| Lbx1 | GTGTTATAACAGGGAAGGGC | 3843 |
| Lbx1 | GCAAGATTGCAGAAGGAGGT | 3844 |
| ibx1 | GGGAGTGGGACAGAAAGAAT | 3845 |
| Lbx1 | GGAAGGAACAAGAGGGAGAA | 3846 |
| Lbx1 | GAGATTGGGAGGTGGGAGGC | 3847 |
| Lbx1 | GTACCCTGTGCCCTCCTTCA | 3848 |
| Lbx1 | GAACAGGCTTCTTCGGTGCA | 3849 |
| Lbx1 | GTAAGAACTGGAGCCCAGGC | 3850 |
| Lbx2 | GGCCTCAGAATCAGAGGGAA | 3851 |
| Lbx2 | GCATATTAAGTGAAACCACA | 3852 |
| Lbx2 | GAGTCCAGTCCTCACTAGCC | 3853 |
| Lbx2 | GGCTGGTACGACTTGCTCAG | 3854 |
| Lbx2 | GGCTCAGGTAAGGAAGGGAT | 3855 |
| Lbx2 | GGCTCCTGGCTAGTGAGGAC | 3856 |
| Lbx2 | GCTGCTGTCACTGAGCTGAC | 3857 |
| Lbx2 | GGTCACTCACATCTCCTATT | 3858 |
| Lbx2 | GAGCTGAAATAAGGCAACTC | 3859 |
| Lbx2 | GGAGAGGTTGCAGTGTCTGT | 3860 |
| Ldb1 | GACTCTGACCTATCATTCAA | 3861 |
| Ldb1 | GGGCAAGTGGTCCCAGGACT | 3862 |
| Ldb1 | GTCAAGTCCTTCTATGCCCT | 3863 |
| Ldb1 | GGGACACACTCACATGGCAA | 3864 |
| Ldb1 | GATTCCGATCACCTACCTGG | 3865 |
| Ldb1 | GTGGTGCTGTCAGGGTAAGG | 3866 |
| Ldb1 | GGAAACACACACGCACAGGC | 3867 |
| Ldb1 | GGCTGTCATACAGCTCAAGA | 3868 |
| Ldb1 | GGAAGAGTTCTTCCCTTCCA | 3869 |
| Ldb2 | GGGAAGGGTGTTCCCTAGAA | 3870 |
| Ldb2 | GTACCTGCTGTACTTCGGAT | 3871 |
| Ldb2 | GAAGAGGTAAATACAAACTC | 3872 |
| Ldb2 | GGAGCACAGCTCTCCCTTTG | 3873 |
| Ldb2 | GATGGTTCCACATTCAGGTC | 3874 |
| Ldb2 | GTGCCAGTGTTGTTGTGTTT | 3875 |
| Ldb2 | GGGTGGATGTTTCTTGCAGG | 3876 |
| Ldb2 | GCTAAGTCAGCGGGTTTAAG | 3877 |
| Ldb2 | GTGCACAGCTGACCCAAAGG | 3878 |
| Ldb2 | GCCCGGAGGAATCTTCCAGA | 3879 |
| Lef1 | GGGTGCTAGGAAATGAACTA | 3880 |
| Lef1 | GTCGCCAGTGCTATGCCTCT | 3881 |
| Lef1 | GAACTCTAGCGAACCACTGG | 3882 |
| Lef1 | GTAGAGTAAATAGAGACACG | 3883 |
| Lef1 | GAGCATTTAATCTGCTGGAG | 3884 |
| Lef1 | GGAGGGAGTCTGTTAGGAGG | 3885 |
| Lef1 | GACTAGAAGTGAGGCGCCGG | 3886 |
| Lef1 | GGGCAGAAAGTTGCCATTTA | 3887 |
| Lef1 | GATTGGGCGAGTGGGATCCT | 3888 |
| Lef1 | GAAGGAAAGAAGCTCTAACG | 3889 |
| Lef1 | GACTTGTTCTAGGAAGTGTT | 3890 |
| Lhx1 | GGTATTAATCGACTTGTTCT | 3891 |
| Lhx1 | GGGTGGGAGAAAGAGTGGGT | 3892 |
| Lhx1 | GGTGAAGTAACCCAGCAGCG | 3893 |
| Lhx1 | GCGAGATCTGGAAGCTTGGG | 3894 |
| Lhx1 | GACTTTGAAGGATGGAGGGT | 3895 |
| Lhx1 | GGGTGGACTTTGGATGGACA | 3896 |
| Lhx1 | GCTCGAGTCTAAGGAGAGGT | 3897 |
| Lhx1 | GACCTTCCCACCTAAAGGGC | 3898 |
| Lhxl | GGACTGCACCGTAGCAGCAG | 3899 |
| Lhx2 | GACGCAATAGTGTCTATTGG | 3900 |
| Lhx2 | GTGAAGCAGGGTATGGAAGC | 3901 |
| Lhx2 | GGTGTCTGGTGGAACAGGAA | 3902 |
| Lhx2 | GACTGCCCTTGGTTTCTTAG | 3903 |
| Lhx2 | GTAACCGTGCCCAAGAGGCA | 3904 |
| Lhx2 | GCAGGATGTGCCAGTGGCTC | 3905 |
| Lhx2 | GAGTGGGAGAGCTAGTGGGA | 3906 |
| Lhx2 | GACGTCGCTTTGCCCTGTCC | 3907 |
| Lhx2 | GTGACTTGTCCGAAGTCCCA | 3908 |
| Lhx2 | GTGCCTGACACCTACTTACC | 3909 |
| Lhx3 | GTCTAACATGGAGGCTGGGA | 3910 |
| Lhx3 | GTGGGTTCAGAGACAATCTG | 3911 |
| Lhx3 | GAAAGGTGCACAGTCTCCAG | 3912 |
| Lhx3 | GTGAGGACAAGGTAACAGCA | 3913 |
| Lhx3 | GTAGTAGGAGCCCTCAGTGA | 3914 |
| Lhx3 | GATGTGGAAATCCAGGTGCA | 3915 |
| Lhx3 | GGTCACAGTCCTAGGGATGG | 3916 |
| Lhx3 | GGTCCAGAGTGTCAGAGTTG | 3917 |
| Lhx3 | GCTTCTAGGCACCTCGGTTC | 3918 |
| Lhx3 | GCACCTCGGTTCCGGCTGAA | 3919 |
| Lhx4 | GCTACACTGGTTTGTTTGGT | 3920 |
| Lhx4 | GATGGGTCTTTACAACCAAA | 3921 |
| Lhx4 | GAAACCTACCGGGTCAGCCC | 3922 |
| Lhx4 | GAACTCGGAGCGCCAACCCA | 3923 |
| Lhx4 | GGTGGCTGTGTGTGCTACTT | 3924 |
| Lhx4 | GCAACAGTGTCTCCTCAACC | 3925 |
| Lhx4 | GCCCGGGAGAGCGAGATCAA | 3926 |
| Lhx4 | GTATAAATACTGCGGCGGGC | 3927 |
| Lhx4 | GCCCGCCGCAGTATTTATAC | 3928 |
| Lhx4 | GTCCTCTAGGATCAAGGAGG | 3929 |
| Lhx5 | GCAGGTGTGTGGGTACCAGC | 3930 |
| Lhx5 | GGGATTCTCCTCATGGATTA | 3931 |
| Lhx5 | GGCCATCTGTCAGTGCTGTT | 3932 |
| Lhx5 | GATTCTCCTCATGGATTAGG | 3933 |
| Lhx5 | GTCTTGGCACAATTCCTCTA | 3934 |
| Lhx5 | GACTCTGAAGGGCTGTGTGT | 3935 |
| Lhx5 | GTTTGTGTGTGTGTGTGTGG | 3936 |
| Lhx5 | GCGAAGCTGCCTTTGGCTCT | 3937 |
| Lhx5 | GGTAAATACTTACTTAGCTT | 3938 |
| Lhx5 | GIGACATCCCTGAGTCAACC | 3939 |
| Lhx6 | GTGTTTGAGGAAGAAGGCTG | 3940 |
| Lhx6 | GCTGTTTACATCTGTAAATG | 3941 |
| Lhx6 | GGTAAATCTTGAAGTGGAAG | 3942 |
| Lhx6 | GATGAGATTTACATAGTCTG | 3943 |
| Lhx6 | GGAGCCTGTGCTAGTGAGAG | 3944 |
| Lhx6 | GCTAGTGAGAGTGGGAGGGT | 3945 |
| Lhx6 | GATACTACTTCAGATTCTTC | 3946 |
| Lhx6 | GGTCAGCCCATCTACAAGGC | 3947 |
| Lhx6 | GAACTCAGTCACGTAAGTGG | 3948 |
| Lhx8 | GAAATTTCAGTCCAATAGGA | 3949 |
| Lhx8 | GCTTCCGGGCTTAGAGAAGG | 3950 |
| Lhx8 | GCTCTTTCAGCGGCTCACGG | 3951 |
| Lhx8 | GATAATGAAGGGACAAACGA | 3952 |
| Lhx8 | GGGTTTGGGCTGGAGATGGG | 3953 |
| Lhx8 | GGAACCTCGCAGAGAGGAGG | 3954 |
| Lhx8 | GCCTTTGATAGGAATCGCCA | 3955 |
| Lhx8 | GAATGCTGGCTCCAGCAGGT | 3956 |
| Lhx8 | GGGAAAGGAAGTGCCGGAGC | 3957 |
| Lhx8 | GACACAGGCAATTATGCTGC | 3958 |
| Lhx9 | GCAAGGCAAAGGCAGGCTAG | 3959 |
| Lhx9 | GTGGCCTCAGAACGGGTGTC | 3960 |
| Lhx9 | GGCATGGACCAAGGACTGGA | 3961 |
| Lhx9 | GGGTTTCTAATGCCCAGCTA | 3962 |
| Lhx9 | GAGGCTACAGTGTCTCAGCT | 3963 |
| Lhx9 | GGATTATTGAGAGGCTGGCA | 3964 |
| Lhx9 | GAAAGGTGGGAATGAAGCAG | 3965 |
| Lhx9 | GTCTATGCGGCTCTGAGTGT | 3966 |
| Lhx9 | GCAGGAAGTCTTTGGAAAGG | 3967 |
| Lhx9 | GAAACTAGGTACTGGAGCAG | 3968 |
| Lmo1 | GTGCTGCCCAGCAAGTCTCC | 3969 |
| Lmo1 | GGCAGGGAAGTCAGGCTTTG | 3970 |
| Lmo1 | GTGCAAACCTCATACATTGA | 3971 |
| Lmo1 | GAGTCTAGGAGGAGAGGCAC | 3972 |
| Lmo1 | GTGCCTCAGGCTTGGGAAGC | 3973 |
| Lmo1 | GCTCTAGAATATCTGGGATG | 3974 |
| Lmo1 | GGCATCTTAGGATTCCACCC | 3975 |
| Lmo1 | GCTGCACCAGTTGGGCTGAG | 3976 |
| Lmo1 | GTGGTCTCTCTTAAACTTAT | 3977 |
| Lmo1 | GAGCTCTAGAATATCTGGGA | 3978 |
| Lmo1 | GTAGATTTCACATACTAAGA | 3979 |
| Lmo2 | GGGAGATACTTTCATGACTT | 3980 |
| Lmo2 | GTTCAGCTGAGTTCACATGA | 3981 |
| Lmo2 | GGTACCTTCTTCAAGCACCC | 3982 |
| Lmo2 | GGGCTGTTCTTACTAAACAA | 3983 |
| Lmo2 | GAGTGGTTACTTTCAGCCTG | 3984 |
| Lmo2 | GGAGGACTTTGCTCAGTACG | 3985 |
| Lmo2 | GTCTTTCACAACTCTTTGGA | 3986 |
| Lmo2 | GCTATTGCTAGGGAGAAATC | 3987 |
| Lmo2 | GAACTTGTCTTCAAGCTTGA | 3988 |
| Lmo3 | GGTCCAGTTGGTTTGGGACT | 3989 |
| Lmo3 | GTGTGATAGGCATGGGTGGG | 3990 |
| Lmo3 | GAGCTCCAAAGGAGAAGGGT | 3991 |
| Lmo3 | GAAATGCATTAAAGCTGACA | 3992 |
| Lmo3 | GACCGGCTATGCCAGGACTT | 3993 |
| Lmo3 | GAGCTGTTCATTTAATTCCA | 3994 |
| Lmo3 | GTGGGCGAGTCCTGGAGGTA | 3995 |
| Lmo3 | GCAGTAGCATAGAGTCACCA | 3996 |
| Lmo3 | GATCCCTGGAGAACAATACA | 3997 |
| Lmo3 | GCTTTGTTGCTAATTTCCCA | 3998 |
| Lmo4 | GGTCTGGTIGGTCTTTGTGG | 3999 |
| Lmo4 | GAGAAACACTAGGACTTTAT | 4000 |
| Lmo4 | GAGCAGATAGCTGGGAGCCT | 4001 |
| Lmo4 | GCAAATGCTCGCATCGCTTT | 4002 |
| Lmo4 | GAATGTCTTGAGCAGATAGC | 4003 |
| Lmo4 | GGCTTTATCTGGGATCCATT | 4004 |
| Lmo4 | GCAGTTTAAAGACCTAGGGC | 4005 |
| Lmo4 | GAATCTGCATTTCCTGCCCT | 4006 |
| Lmo4 | GAAACTTACTTTCCCAGAAA | 4007 |
| Lmo4 | GAGCTCTGCCTAGGGAAGTG | 4008 |
| Lmx1a | GTTCGCTCCTGCTCTCTCCC | 4009 |
| Lmx1a | GCCTCTCTAGAGGCAGGAAC | 4010 |
| Lmx1a | GTCTGCCATCCAGATAGAAC | 4011 |
| Lmx1a | GATGTGTTTATTGAGTCACT | 4012 |
| Lmy1a | GGGAACGTCTGCAGGAGCAA | 4013 |
| Lmx1a | GTTAGGAGAACGCAGTTAGG | 4014 |
| Lmx1a | GAGTACCATAGTTCTAGTGG | 4015 |
| Lmx1a | GGCCACATTAGTATAGGATG | 4016 |
| Lmx1a | GGGTTAGGAGAACGCAGTTA | 4017 |
| Lmx1a | GGGCAGCAGACTGGAGCATC | 4018 |
| Lmx1b | GACAGCCTGGTGTGCTGAGA | 4019 |
| Lmx1b | GGATCTGGACCGCCTTCTCT | 4020 |
| Lmx1b | GGATCAGATTTGGAGCCTGA | 4021 |
| Lmx1b | GGCCTGGCAGAAATAGGGCG | 4022 |
| Lmx1b | GAACGCAGCGACTTCTCCAG | 4023 |
| Lmx1b | GAGCCGCTCGGTTTAGAGCT | 4024 |
| Lmx1b | GGCGACGGCACTATTTGACG | 4025 |
| Lmx1b | GGTCCCTTAGCCACAATGAA | 4026 |
| Lmx1b | GAGACCAAGAGAGTGTTAAG | 4027 |
| Lmx1b | GCTCCTAGGGTCGAGGGATG | 4028 |
| Lrrc41 | GGTCAACCAAAGAATTCTGA | 4029 |
| Lrrc41 | GGCTCCCGACATGGGACTAG | 4030 |
| Lrrc41 | GACTAGTAAGGGTCACTCGA | 4031 |
| Lrrc41 | GCATTTGTCTTGTCTACTTC | 4032 |
| Lrrc41 | GCTTTGTTGAGCTAGGTCCC | 4033 |
| Lrrc41 | GGACCGCTCCATAAGGGATA | 4034 |
| Lrrc41 | GTAAAGAGCAGAGGTTACAG | 4035 |
| Lrrc41 | GGGCTCCTGGGATCAAACTC | 4036 |
| Lrrc41 | GCCCAATTTGTGCGTGTGTT | 4037 |
| Lrrc41 | GTTAGTCTTTAACGTAGCTT | 4038 |
| Lyl1 | GGAGGAAATGCCTGGATAGC | 4039 |
| Lyl1 | GGCTGGGCAAAGACAAAGTG | 4040 |
| Lyl1 | GAAGGAGCCAGCTGAGGACC | 4041 |
| Lyl1 | GCTCAGGAGAGCAGTTCATC | 4042 |
| Lyl1 | GGCCTCAGAGGACCGGAAAG | 4043 |
| Lyl1 | GCTAGAGGAGTCACTAGGGT | 4044 |
| Lyl1 | GCAGTTCATCAGGTGGCCAC | 4045 |
| Lyl1 | GTGGTAATGTTGTAGAAGTG | 4046 |
| Lyl1 | GCTCCGGAAGGAGACAATTC | 4047 |
| Lyl1 | GCTGTGCTAGAGGAGTCACT | 4048 |
| Maf | GTTATTGCCACAAATCGGGT | 4049 |
| Maf | GCTCTTTCAAAGGGCTGGCA | 4050 |
| Maf | GGATTCTAGTGTACATTCGA | 4051 |
| Maf | GTGCGAAGTTTAGTGCACCA | 4052 |
| Maf | GGAGGATGGTTTGCTTTCCT | 4053 |
| Maf | GATCACCTCACTTGCAGAGA | 4054 |
| Maf | GTGTGCACGTTCGAGCTTTC | 4055 |
| Maf | GGGTTTCCGGACTTGTCCGG | 4056 |
| Mafa | GATCCCAACCGAAGATAGAA | 4057 |
| Mafa | GGAGGAGGAGGGCAGGATTG | 4058 |
| Mafa | GACCTCGTGCTCTAACTCAA | 4059 |
| Mafa | GTCTCCTTTGGAACAGGCTG | 4060 |
| Mafa | GCTGTGGTTCATCTAGGACA | 4061 |
| Mafa | GGGATCTGGAATTCTGGAGG | 4062 |
| Mafa | GGACACTGAGGGAAGGAGCT | 4063 |
| Mafa | GGCCTGGAGTCTCCAGAATG | 4064 |
| Mafa | GAGGAACAGAAGGAGGAGGA | 4065 |
| Mafa | GGTGTCTCAGATCCATTAGG | 4066 |
| Mafb | GGAGGCTGGACCATTGAAAT | 4067 |
| Mafb | GGTTTAGATCAGTGAACTGC | 4068 |
| Mafb | GGTGAGTGTGTCCTAGCTGC | 4069 |
| Mafb | GGAGGAGGAAGGCAGAACAC | 4070 |
| Mafb | GAGCCACTGAGTGCACAGAC | 4071 |
| Mafb | GTGGCAGCCTGGAGAGAGAA | 4072 |
| Mafb | GCAAACCCTCCTGGGAACAC | 4073 |
| Mafb | GTGGAAACCTTACAACTCCG | 4074 |
| Mafb | GTTGCGCACCGTGGCCACTT | 4075 |
| Mafb | GCGGGCCGAGTGAATGTGTG | 4076 |
| Maff | GTAAGGACGCGTCAGGGACG | 4077 |
| Maff | GATCGGGACCGCAGTTCACT | 4078 |
| Maff | GCAAGAACTCCGAGGTTTCA | 4079 |
| Maff | GGTTTCACGGGTCCTGGGTC | 4080 |
| Maff | GGTTTGTTTACGTCTCCCGG | 4081 |
| Maff | GGTGACGTCACTGCATGACT | 4082 |
| Maff | GCTCGCCTTACAACTGCGCG | 4083 |
| Maff | GACAAGCACGCACTGAGCGC | 4084 |
| Maff | GAAACAAGGCTACCAGACCC | 4085 |
| Maff | GCTCTGAAGCCTCTTCTCCC | 4086 |
| Mafg | GACCTGTGAGTTGGAGGCAA | 4087 |
| Mafg | GGCTGATCCTTGCTTGCTGT | 4088 |
| Mafg | GGGCTCTGGACCACTCATTC | 4089 |
| Mafg | GACCGTGCTCCTGCAGAGAC | 4090 |
| Mafg | GCACAGGAAAGTGCAGAGTG | 4091 |
| Mafg | GGTGTATGTGTGTTGAGGGT | 4092 |
| Mafg | GCCTCAGGGCTCAGGGTTAA | 4093 |
| Mafg | GGAGAACGGCTCAGGAAGGG | 4094 |
| Mafg | GGAGAGAAGACCTACGTAGG | 4095 |
| Mafg | GCCATTCAGGGTCACAGAGA | 4096 |
| Mafk | GGTGGTGGCAGTGAGGATGA | 4097 |
| Mafk | GTCAGGTTAGAGGCAGAGGG | 4098 |
| Mafk | GGAAGGTGCCTGGAAGAAGG | 4099 |
| Mafk | GGACTGCCAGGATGTCGTGC | 4100 |
| Mafk | GGTGAAGGCACTTAGGGTGA | 4101 |
| Mafk | GTTTCTGGTCTCCCAGAATG | 4102 |
| Mafk | GAGGCTGACAGCAGGGTGCA | 4103 |
| Mafk | GTGCTGAGGAACTGCTTCCG | 4104 |
| Mafk | GTAAGGAGGGAGGAGGGATT | 4105 |
| Mafk | GACATCACTAATGTTGTTAT | 4106 |
| Mapk8ip1 | GCTTTGTAGCCAGGATGGGT | 4107 |
| Mapk8ip1 | GTGTCTATGTCCTCTCAGCA | 4108 |
| Mapk8ip1 | GATCTAGCCCGTGGTGGCTA | 4109 |
| Mapk8ip1 | GGATCGAAGCGTCAGCACTT | 4110 |
| Mapk8ip1 | GGAGAACCACACAGCCTGGC | 4111 |
| Mapk8ip1 | GAGTCCCAGACCTTACAGGC | 4112 |
| Mapk8ip1 | GTCCTGCTCCATTTATGTGA | 4113 |
| Mapk8ip1 | GAACCTAAAGCCAGAGGCCT | 4114 |
| Mapk8ip1 | GCTCCATTTATGTGAAGGGC | 4115 |
| Mapk8ip1 | GACGGAGGAGGTCACTACCA | 4116 |
| Max | GGACACATCATGCCATTCCT | 4117 |
| Max | GTTTCTGCACTCAATAGTCA | 4118 |
| Max | GCCAGATTTCAGGGAGGGTG | 4119 |
| Max | GACTTGTAGTCCTCGAGCGT | 4120 |
| Max | GAGAAACTACAAATCCCATC | 4121 |
| Max | GAGATGCCAGATTTCAGGGA | 4122 |
| Max | GATACCAGAAGTAGAGACAA | 4123 |
| Max | GAATCTAGTTTAGGCTTTGT | 4124 |
| Max | GGCTGTAAGGGAGACAAAGA | 4125 |
| Maz | GGAAGGCATCTCTGGGAAGC | 4126 |
| Maz | GGGACAGGAGGGACTCTAGA | 4127 |
| Maz | GGGTTGTTACCTCACTGAAG | 4128 |
| Maz | GAAGGGAGTGGACACAGCAC | 4129 |
| Maz | GGGTGGATCAAGCTCTCTGC | 4130 |
| Maz | GAGGACTTGGAACAGGTGGA | 4131 |
| Maz | GTTGCTGGGATCCATGGCGG | 4132 |
| Maz | GAAATAACGGCCGCTGGCGG | 4133 |
| Maz | GACACACAAGAGGCTGGAGC | 4134 |
| Maz | GCAGCCAATCCAAACACAAG | 4135 |
| Mbd2 | GCCTGTCTCAGAGATGAGTG | 4136 |
| Mbd2 | GTGTACAGATGGAGAAACCA | 4137 |
| Mbd2 | GAGTGGCAGAAGTGTACAGA | 4138 |
| Mbd2 | GACCAGTGACCTTCATGCAG | 4139 |
| Mbd2 | GTGTCGTGAAGGCAGAGGCT | 4140 |
| Mbd2 | GGCTCTTGATATAAACCTCC | 4141 |
| Mbd2 | GTGGCCCTGACTCCAAGGTC | 4142 |
| Mbd2 | GGGAGTTTGTGCAGGAGTGG | 4143 |
| Mbd2 | GCAAACAAAGGCTCTGAGCT | 4144 |
| Mecom | GATTCTCAGGCAGGGCTCTA | 4145 |
| Mecom | GACCAGTTCACTGAAAGATG | 4146 |
| Mecom | GGCAGTTCTCTTGCCTAGTG | 4147 |
| Mecom | GTAGTTTGGAAGCTCTGAAG | 4148 |
| Mecom | GGCTTCCCTGCATTGATCTT | 4149 |
| Mecom | GTGTTTCTGTCTTCTCTTGG | 4150 |
| Mecom | GATGGCAATCGCCGAGGAGG | 4151 |
| Mecom | GTGGTGGGTATTCTTAGATG | 4152 |
| Mecom | GTTACTATTGGAGAGAGGCA | 4153 |
| Mecom | GGGAAGTGAGAAGGGTGGAT | 4154 |
| Mef2a | GATACGAGATTACCAGACAC | 4155 |
| Mef2a | GAGGGTTTGTGCCCATTGCA | 4156 |
| Mef2a | GATGTGCACAAAGCAGCCAT | 4157 |
| Kaf2a | GCAAACAGAAGGCAGGGATG | 4158 |
| Mef2a | GAAGTTACAAAGGAAGCTGG | 4159 |
| Mef2a | GCTGGATCCTTGCTGTGACC | 4160 |
| Mef2a | GCCCGGGAGAGAAGAAAGAG | 4161 |
| Mef2a | GGTAATAAGAATGTGATGGC | 4162 |
| Mef2a | GAGGACTGCAAACAGAAGGC | 4163 |
| Mef2a | GCAGGGACTCAGCATTGCTC | 4164 |
| Mef2b | GGGCCAGAGGAAGACCCAAG | 4165 |
| Mef2b | GCAGAGGGAAAGTCACTGTG | 4166 |
| Mef2b | GACAAAGCTGGAGCTGGCTG | 4167 |
| Mef2b | GCTGCACTAGAATGCTGTTG | 4168 |
| Mef2b | GTCCTCCCAGTTGCTCCAGT | 4169 |
| Mef2b | GAATGTCAGGGTCAGAGGIC | 4170 |
| Mef2b | GGAAGTAAGGCCCAGAAATG | 4171 |
| Mef2b | GTCATCGCCTCTGGCTATTC | 4172 |
| Mef2b | GCTCGCCTCTGGCTTTGCAG | 4173 |
| Mef2b | GTGAAGGGCTTTGGGATGTG | 4174 |
| Mef2c | GATACTGGGTGATGCCATTC | 4175 |
| Mef2c | GTTGGCTTCAGTCTTGGTCG | 4176 |
| Mef2c | GCTTGTAACTCTAAGAGACT | 4177 |
| Mef2c | GCTAAACCAGGTACATTTAA | 4178 |
| Mef2c | GATATCAGCAAGTGTTCAGC | 4179 |
| Mef2c | GAAAGCTAGAAGACAGAGGA | 4180 |
| Mef2c | GAGTTACAAGCTTTCTAATT | 4181 |
| Mef2c | GTGTGATGAGAGAAAGAAAC | 4182 |
| Mef2c | GAGAATGTTTCTCTACACTT | 4183 |
| Mef2c | GTCATGGCACTTAAACGATT | 4184 |
| Mef2d | GCTTCTGGATGTTTCCTGTG | 4185 |
| Mef2d | GGAAATGACAGAGTCTGGCG | 4186 |
| Mef2d | GAGAGTGAIGGACAAGCAGG | 4187 |
| Mef2d | GTCCCTGTTCTGGCTTCTTG | 4188 |
| Mef2d | GCCATTGGGTCCCAGCTTGT | 4189 |
| Mef2d | GCAGAATAGTCCTATTGAAC | 4190 |
| Mef2d | GTCACAGGTAGAGGGAGCAG | 4191 |
| Mef2d | GAGGCAAGGGAGGTAGTGGT | 4192 |
| Mef2d | GCCTAGCTTGCGAGATGGGA | 4193 |
| Mef2d | GAACTCTCCAGATGGCGCAG | 4194 |
| Meis1 | GTGTAAGACGCGACCTGTTA | 4195 |
| Meis1 | GCGTCGCCGCTGAAAGAGCT | 4196 |
| Meis1 | GTCAAAGCCAGAGCAAGAAG | 4197 |
| Meis1 | GAGCACCGGTGAAATTCCCA | 4198 |
| Meis1 | GTGAACATATGTCAACCTTC | 4199 |
| Meis1 | GAGGGCTGCAAGAGAGGAGG | 4200 |
| Meis1 | GCCGCATTGGTCTGGAGCTG | 4201 |
| Meis1 | GCCAGAGCAAGAAGAGGAGC | 4202 |
| Meis1 | GGGAATGCAAACTGCCATTC | 4203 |
| Meis1 | GCAATCTAAGCCACGAGAGC | 4204 |
| Meis2 | GAGTGAGTGTCAGTAGGTGT | 4205 |
| Meis2 | GAACTCGGAGCATAGTCCCT | 4206 |
| Meis2 | GCTCGTAACCTTCAGTTCGG | 4207 |
| Meis2 | GCAGGAGCCAAGAGGAGTGG | 4208 |
| Meis2 | GGGTCCTGGCCTCAATCTGG | 4209 |
| Meis2 | GTCAGTAGGTGTTGGCAGGT | 4210 |
| Meis2 | GCTCAAAGGGAGAGAAGGCA | 4211 |
| Meis2 | GAAAGCAGCGCCTCCTGCAA | 4212 |
| Meis2 | GATATAAATCCTCTCCTACA | 4213 |
| Meis2 | GTTGGCAGGTTGGCTGCAGC | 4214 |
| Meis3 | GTCTGAGCTAGGAAGACTTA | 4215 |
| Meis3 | GAGAGGCGGTGACTTCGGGA | 4216 |
| Meis3 | GGCACACTCAGGACAATAAG | 4217 |
| Meis3 | GTGGTGGTGACAGAAATAAG | 4218 |
| Meis3 | GACTGCACAGCCATGGCTAA | 4219 |
| Meis3 | GAGCCACCTCACTCAGTCTA | 4220 |
| Meis3 | GGCCTGAGAGGCTATGGAGG | 4221 |
| Meis3 | GAGCTGCTGTGCTTCCCTCA | 4222 |
| Meis3 | GGCTAGGCAGAGAGGACCTG | 4223 |
| Meis3 | GCAGTGAGGACCAAGAGGGA | 4224 |
| Meox1 | GTGAGATGGAAGGAGCCCAC | 4225 |
| Meox1 | GTTCCCTGTCAAGGCCCTGT | 4226 |
| Meox1 | GACATGGAGGCAGGAACCCA | 4227 |
| Meox1 | GCTGACAAATGGGTTGCTGT | 4228 |
| Meox1 | GAGGTGAGGTGTGCTGTCCC | 4229 |
| Meox1 | GTGATTAGCCCGGAGAGGTG | 4230 |
| Mecx1 | GGTAGAGAGTCTTTAAATCA | 4231 |
| Meox1 | GTCTACGCTATACCTATACC | 4232 |
| Meox1 | GAGACAAAGATGGATGGAGG | 4233 |
| Meox1 | GCTTGTGTATGTGCTGTGTT | 4234 |
| Meox2 | GTCCTGCAATTGCATGACTT | 4235 |
| Meox2 | GGAACCTATGGGACAGATTG | 4236 |
| Meox2 | GGGATGTCTGCAGTAGCCTA | 4237 |
| Meox2 | GGTTCCAGCGTAAACACATT | 4238 |
| Meox2 | GTTTGCATGTGGTCAGCGCT | 4239 |
| Meox2 | GCAGCAAGGCTTTGACGGTA | 4240 |
| Meox2 | GTCCTGCCAGCAATGGGAAC | 4241 |
| Meox2 | GGAGCTTCCACCACAGCTAG | 4242 |
| Meox2 | GATTTCATTTCTCAAAGGAT | 4243 |
| Meox2 | GAGACACTGTGTGCTGGCTT | 4244 |
| Mesp2 | GTATACAGCAAATTGGCTAA | 4245 |
| Mesp2 | GAATGACTTCCAGCCCTCCC | 4246 |
| Mesp2 | GAAGTGGAAATGGAAGGAGG | 4247 |
| Mesp2 | GAGAGCCCTTGGGCAGTGAC | 4248 |
| Mesp2 | GGCTGGGAAGTGGAAATGGA | 4249 |
| Mesp2 | GGAAAGGCCTGGAGGTGGGA | 4250 |
| Mesp2 | GAAGGGAAAGGCCTGGAGGT | 4251 |
| Mesp2 | GCAATTTCAGGATTAATCCA | 4252 |
| Mesp2 | GCATTGTTTCATTAGGGAGA | 4253 |
| Mesp2 | GAGGCACGGGATAGACATCC | 4254 |
| Mga | GAATGTCTGCCCTCACATTC | 4255 |
| Mga | GGAAACCAAGAATGTAAGGA | 4256 |
| Mga | GGAAAGGAGAGACAGGAGAG | 4257 |
| Mga | GAAGCTTCATAAGTTCTTTC | 4258 |
| Mga | GTTTGGCCTCCTGATGTTGG | 4259 |
| Mga | GAGTCTTCTTGGGAAAGGCC | 4260 |
| Mga | GCTCTAGAAATTGTGAGAAG | 4261 |
| Mir101a | GTTGGAAAGTACCAGAACAC | 4262 |
| Mir101a | GGCTTGAAACTTAACCTTCC | 4263 |
| Mir101a | GTTTGAGATGTGACTGACAT | 4264 |
| Mir101a | GGCAAATCACAGAATGTCCC | 4265 |
| Mir101a | GCAAATCACAGAATGTCCCA | 4266 |
| Mir101a | GCTATCTTTGCACTTTGGAG | 4267 |
| Mir101a | GCACGTTTATGGTTCTTGAT | 4268 |
| Mir101a | GTGTGAGGCTAGAAATCTTT | 4269 |
| Mir101a | GTGCATAGGTGTGAGATTGG | 4270 |
| Mir101b | GGAGTTCAGCAGGAGCCCAT | 4271 |
| Mir101b | GGGCTCTGCAAATGGGCAGA | 4272 |
| Mir101b | GAGCCCTCCCTTCCAAATTG | 4273 |
| Mir101b | GTTCTGCTGCTCATGACCCT | 4274 |
| Mir101b | GGAAGAGGTAAGACGCACTT | 4275 |
| Mir101b | GGTGTACTGGGAAGAAGGCA | 4276 |
| Mir101b | GAGCCGCTCTTGTCTTCAGC | 4277 |
| Mir101b | GTCCCTTTCTAGGAGACCAT | 4278 |
| Mir101b | GGTCAGATTTCCTGTTTGTA | 4279 |
| Mir101b | GACCTCAATTAATCTAACAC | 4280 |
| Mir106a | GGTCCAAGAGGATAGATATT | 4281 |
| Mir106a | GTCTGACTCTTAAGAGTAAG | 4282 |
| Mir106a | GAGAGTTAACTAAGGTGGGA | 4283 |
| Mir106a | GAAGGGCAAGGCTGAGGGAG | 4284 |
| Mir124a-2 | GTCTTCTTTGTGACCTGTAA | 4285 |
| Mir124a-2 | GGTGCTTTAGGATGGGCGGT | 4286 |
| Mir124a-2 | GATGGAAAGAAGAAGAATGA | 4287 |
| Mir124a-2 | GGCACAGGTTTGGTTCACTG | 4288 |
| Mir124a-2 | GTTAGATGGGTAAGGGCGCG | 4289 |
| Mir124a-2 | GAGATTGGAGAATGCGGTTC | 4290 |
| Mir124a-2 | GTGTTCTCGGAGGAAAGAGG | 4291 |
| Mir124a-2 | GGTAGAAAGCAGAGACAGTT | 4292 |
| Mir124a-2 | GACTGGAGAGGAGGGACAGG | 4293 |
| Mir124a-2 | GCCAGCCTGGACCTTGACTG | 4294 |
| Mir124a-3 | GCTGCCTGTGCGCTAAGAGA | 4295 |
| Mir124a-3 | GGGACAGTGCCAAGGAAGCC | 4296 |
| Mir124a-3 | GGGCCTTTGTTCCTGCAGAC | 4297 |
| Mir124a-3 | GAAGGGTTGTCCTGGGTGTG | 4298 |
| Mir124a-3 | GCGGTTCGAGAGTGTCCAAG | 4299 |
| Mir124a-3 | GCTCTCTTCTCTTACGCCTC | 4300 |
| Mir124a-3 | GACTGGCACCTGCAAAGGGA | 4301 |
| Mir124a-3 | GGGTTGGGCATAAGCAAAGG | 4302 |
| Mir124a-3 | GCTTCTGAGCCTCTCTCTCC | 4303 |
| Mir124a-3 | GCACTCACGCACTCCTGGTG | 4304 |
| Mir125a | GACCTCATTTCTGAGTTGGG | 4305 |
| Mir125a | GACAACTGACTTTGGTCTAG | 4306 |
| Mir125a | GGCCGGCAGTGTAGCTATGG | 4307 |
| Mir125a | GAGACCAGAAGTAGGGAGGG | 4308 |
| Mir125a | GCCTGGGATATGAAACCTTT | 4309 |
| Mir125a | GAGACTGGAAGATGGGAGGA | 4310 |
| Mir125a | GTCTGGGAGGTTGGGAAGGA | 4311 |
| Mir125a | GCTTCCCTGGATCTGTGGGA | 4312 |
| Mir125a | GCTCTGAGCCAGGTTGGTTG | 4313 |
| Mir125a | GTCCAGGTTGCTCTGAGGAC | 4314 |
| Mir125b-1 | GTTCAATAGGACAGAGAATG | 4315 |
| Mir125b-1 | GTGTTCAATAGGACAGAGAA | 4316 |
| Mir125b-1 | GTAGCTGTCTGTGAAGATGG | 4317 |
| Mir125b-1 | GAGCTAAAGGTGATTAGAGG | 4318 |
| Mir125b-1 | GTGTGTGGATGCCAAACAAT | 4319 |
| Mir125b-1 | GAGCTGAACCTACAGAGGTG | 4320 |
| Mir125b-1 | GGAAGGCTGTTGGGTGGGAG | 4321 |
| Mir125b-1 | GGGTTGGAGCACGTTCAAGA | 4322 |
| Mir125b-1 | GGCCATATCAGGACAAGGAG | 4323 |
| Mir133a-1 | GGGACAGCTGATCTAAGTGC | 4324 |
| Mir133a-1 | GTTAGTGATACATTGATGTA | 4325 |
| Mir133a-1 | GAGCAACTGCACTTGCTGAC | 4326 |
| Mir133a-1 | GAGTATGGAAGTCATCCTCC | 4327 |
| Mir133a-1 | GCAAATTATAAAGAAGAGGG | 4328 |
| Mir133a-1 | GTGAGTACATGTTAAACTCT | 4329 |
| Mir133a-1 | GCTAAAGGAAACTTTCCAGG | 4330 |
| Mir133b | GTTGGGTGCTTTAAAGTATG | 4331 |
| Mir133b | GGTTCTCTCTGTTACAGGCT | 4332 |
| Mir133b | GTACCTTGATGATTCGAGAC | 4333 |
| Mir133b | GAGTCTATCGAGGGAAACAG | 4334 |
| Mir133b | GAGATCAAGTGTAGGTAAGA | 4335 |
| Mir133b | GAGTCCATCTGGAAGAAGCC | 4336 |
| Mir133b | GACTTTAGTAGAGTCTATCG | 4337 |
| Mir133b | GCATGCCACCCTATTCTTCT | 3338 |
| Mir134 | GTAGGTCAGAAGTCCTCTGC | 4339 |
| Mir134 | GAATGATTCGGTGGGCTGCA | 4340 |
| Mir134 | GCTCTGAAAGGCTGCTAAGA | 4341 |
| Mir134 | GATGGCAACTTGCAGAAAGA | 4342 |
| Mir134 | GCTCTAGAAACACACTGGAG | 4343 |
| Mir134 | GAGCCACAGCTGCCTCACCA | 4344 |
| Mir134 | GTCTTCCTAAGAATGGATTG | 4345 |
| Mir141 | GGCTCGCAGGTGGATAGTAG | 4346 |
| Mir141 | GTGGAGGCCAAGTCGGCTCT | 4347 |
| Mir141 | GACGCCGATGACACTGGGAC | 4348 |
| Mir141 | GATCTGCCGCTTCTCTTGAG | 4349 |
| mir141 | GAGATCTGCCGCTTCTCTTG | 4350 |
| Mir141 | GGAGGAAGGAGCCGCTGGAA | 4351 |
| Mir141 | GGAAGCCTCTGCAGGGATCA | 4352 |
| Mir141 | GAAGAGTTGGCTCCCACCAT | 4353 |
| Mir141 | GCGGGTCTGGTGCCAGGTAA | 4354 |
| Mir141 | GGTGGGAGCCAACTCTTCCC | 4355 |
| Mir150 | GGTATGGTGATACCCATCTT | 4356 |
| Mir150 | GGAGTAGAGCCACTAAGCAG | 4357 |
| Mir150 | GGATCCAGGTGTTCTGAGAC | 4358 |
| Mir150 | GAAGACATTTCCACCGGGAG | 4359 |
| Mir150 | GTGTGGAACTTTCTTTGGGT | 4360 |
| Mir150 | GCAGAGGTTATGTATGGTTA | 4361 |
| Mir150 | GCGGGTGAGGCTTCTCAGCA | 4362 |
| Mir150 | GTTGCAGAGTCTGTGAGGGA | 4363 |
| Mir150 | GACCTGTTTCAAACGAAGCC | 4364 |
| Mir150 | GGCATATCACCATTTCTCTG | 4365 |
| Mir150 | GCTTGGAAATTTCCAAACCA | 4366 |
| Mir155 | GCCATATTATTGACCCATTA | 4367 |
| Mir155 | GCCACATAGTGAATGGGACC | 4368 |
| Mir155 | GCAGGTGCTGCAAACCAGGA | 4369 |
| Mir155 | GTGATATGCCACATAGTGAA | 4370 |
| Mir155 | GTTGCATATATTCTCCCTAA | 4371 |
| Mir15a | GTTATCCTAAGATGATGTTC | 4372 |
| Mir15a | GTGGTTTATATTCTGGCCTA | 4373 |
| Mir15a | GAACATCATCTTAGGATAAC | 4374 |
| Mir15a | GAAGCTTTGTCCIATGGATT | 4375 |
| Mir15a | GACACTCAAAGGACAGTGTC | 4376 |
| Mir15a | GCTGGCACACTTGAAAGCAA | 4377 |
| Mir15a | GGAAACAAATAGAGTTGAAG | 4378 |
| Mir15a | GCGTGCTGGAGGAAGTGCTT | 4379 |
| Mir16-2 | GCATATGTGTGTAAAGAGTC | 4380 |
| Mir16-2 | GTTAAGGGAGAGGCAAAGAG | 4381 |
| Mir16-2 | GAGGTCTTGTTCGCCTTCCT | 4382 |
| Mir16-2 | GGCTGAAATTTGTGTTTGCT | 4383 |
| Mir16-2 | GAGGCTCTAGGTTAAGGGAG | 4384 |
| Mir16-2 | GCTGGATAACAGAAGTTTAG | 4385 |
| Mir16-2 | GCTCCTCACCTGGAGGCTCT | 4386 |
| Mir16-2 | GCTATCTCTGTAGGCGGTTC | 4387 |
| Mir181a-1 | GCATTGATCTGACAAATGAG | 4388 |
| Mir181a-1 | GATTCCAGAATGACTGGAGT | 4389 |
| Mir181a-1 | GCAAAGCACCGCAATGTGAG | 4390 |
| Mir181a-1 | GATTACAGGACAAGTGTCTC | 4391 |
| Mir181a-1 | GAATTTCAGGCAGTAGGCAT | 4392 |
| Mir181a-1 | GTTACAGGCTGTTAAAGACA | 4393 |
| Mir181a-1 | GTAAGAGAATAACTTCAGGA | 4394 |
| Mir181a-1 | GATCTGACAAATGAGAGGGA | 4395 |
| Mir181b-1 | GGTCCTTAGAATATGAGAGC | 4396 |
| Mir181b-2 | GCAACCAAGCCAGCCTTAAG | 4397 |
| Mir181b-2 | GAATCCCAAGGTACAGTCAA | 4398 |
| Mir181b-2 | GAACTCTGGTGTTCAAGTTC | 4399 |
| Mir181b-2 | GAGCATCACTAGCACTTCTG | 4400 |
| Mir181b-2 | GTGTCATTCTAGTCAGAAAT | 4401 |
| Mir181b-2 | GTGCTAATTTAAGGAATTCT | 4402 |
| Mir181b-2 | GCAACATATCCAACCAATAC | 4403 |
| Mir192 | GAGTTGCTGTTACAGAGGGT | 4404 |
| Mir192 | GGAGTTGCTGTTACAGAGGG | 4405 |
| Mir194-2 | GAAGGCTTGGCTTAGGGCTC | 4406 |
| Mir194-2 | GGAAGCCTCTAGAGTATGCT | 4407 |
| Mir194-2 | GCCAACTGGCCGAGAGAGTG | 4408 |
| Mir194-2 | GATCAAGGCTTAGACAGAGT | 4409 |
| Mir194-2 | GGCAGCTCTGCTGCTTCTCT | 4410 |
| Mir194-2 | GGGAGCCTTCAGCAGCCTTC | 4411 |
| Mir194-2 | GATGGCTTGGCAGGAAGGCT | 4412 |
| Mir194-2 | GGGTCCAGGAAGTACCAGAC | 4413 |
| Mir194-2 | GGGATAGATGCCATGTGGGT | 4414 |
| Mir194-2 | GAGAAGCAGCAGAGCTGCCA | 4415 |
| Mir196a-2 | GAGAGCAAACTGCAATCTTG | 4416 |
| Mir196a-2 | GATAGTCTCCCGTTAGTTTC | 4417 |
| Mir196a-2 | GAGGGTTTAGTCTAGACACT | 4418 |
| Mir196a-2 | GGAATAAACTTAACTGCCGG | 4419 |
| Mir196a-2 | GGCTGACAGCAAAGAGCGGA | 4420 |
| Mir196a-2 | GGGAAAGACAGAGAGAGGGA | 4421 |
| Mir196a-2 | GTCAAATGCACCCGATTAGA | 4422 |
| Mir196a-2 | GGAGCAGGACAACTTGGAGG | 4423 |
| Mir196a-2 | GCGGCAGCAAGAGAAGGAGG | 4424 |
| Mir196a-2 | GAACCGAGAGAATCGGATCC | 4425 |
| Mir196b | GGGCTGGGTTTGCTGCCTCT | 4426 |
| Mir196b | GCGTGGGTTCTTCTGGGACC | 4427 |
| Mir196b | GGCGCCTAGGAGGGAGAAGA | 4428 |
| Mir196b | GGTGTCTGGCCTGAGGTCAA | 4429 |
| Mir196b | GAACCCACGCCCGAAATCCG | 4430 |
| Mir196b | GGAAACTCAAAGGTGAATGA | 4431 |
| Mir196b | GTATGGAAGCATGGACATTC | 4432 |
| Mir196b | GAGGACCGGGTGTGGATTTG | 4433 |
| Mir199a-2 | GCAGGTACAAATAAGTTGTT | 4434 |
| Mir199a-2 | GGCTTCCTACAATAGCGTGG | 4435 |
| Mir199a-2 | GGCACATTTGCAGCAGACTA | 4436 |
| Mir199a-2 | GGCCTCCTTCTCCTTCTTTA | 4437 |
| Mir199a-2 | GGGTGACATCATCCCATATA | 4438 |
| Mir199a-2 | GATTCTAGCGGTCTCTCCAG | 4439 |
| Mir199a-2 | GGGCTGGAGAGTCCATATAT | 4440 |
| Mir199a-2 | GGACTAGGCATAGAAAGGGA | 4441 |
| Mir199a-2 | GGACTATTTGAGAGTGGTTA | 4442 |
| Mir199a-2 | GGGAATGATGACCAAGAGGA | 4443 |
| Mir1a-1 | GCTCCCATTGCGTCCGCACT | 4444 |
| Mir1a-1 | GTGTCTCCAGCTCTTTCTGT | 4445 |
| Mir1a-1 | GTAAAGACTGGAAGCAGACA | 4446 |
| Mir1a-1 | GTAAGTTTAGCCACAATCTC | 4447 |
| Mir1a-1 | GGCACTGAGACCTTCTCTCG | 4448 |
| Mir1a-1 | GGACTGATGGATCAGGAACT | 4449 |
| Mir1a-1 | GGATGTGACTTCCCTCTGTT | 4450 |
| Mir1a-1 | GTCGTAAGGAACCGCTCCCA | 4451 |
| Mir1a-1 | GACACCCACTGCAGGAGAGG | 4452 |
| Mir1a-1 | GAGTTCTCAGGGAGCCTAAG | 4453 |
| Mir200a | GAGGAAGGACTTAGCACCCA | 4454 |
| Mir200a | GACGGACTTGGGATGAGGAG | 4455 |
| Mir200a | GCATCTACTAGGCTTAGTTT | 4456 |
| Mir200a | GATCAAGGCACTCTGGAAAG | 4457 |
| Mir200a | GTCCCAAGTATCCTTGGGAC | 4458 |
| Mir200a | GGTCTGCTTTGTCCAAAGCA | 4459 |
| Mir200a | GCGGCTCCATTGCTGCATGC | 4460 |
| Mir200a | GCGGCCTCCATATCCAACTT | 4461 |
| Mir200a | GGATACTGGGATGAGGGACC | 4462 |
| Mir200a | GATCCGAGGAAATCAGTACA | 4463 |
| Mir200b | GTTGGAACTGCGTGTCTTCA | 4464 |
| Mir200b | GTCATCTTCAACTCCCTGCT | 4465 |
| Mir200b | GCCTGCCTCCCAGCTCTTTC | 4466 |
| Mir206 | GCGTCACTAACTGTGAGGCC | 4467 |
| Mir206 | GTCTGACTGATCACCCTGGA | 4468 |
| Mir206 | GGCAGCTGTTGAGCCATTCA | 4469 |
| Mir206 | GATCTCAGACTGAAGTGTAT | 4470 |
| Mir206 | GCCTAACAGGCAGAGCTTGT | 4471 |
| Mir206 | GACTAGTATGCTAGTATGCC | 4472 |
| Mir206 | GAACAGCCTTGGATCAGTCC | 4473 |
| Mir206 | GGCCAAACTTCCTGCACATT | 4474 |
| Mir206 | GACCAATCCACCAAATGTGC | 4475 |
| Mir21 | GCAGAGACGGACCTATGCCG | 4476 |
| Mir21 | GTTAGAGCCCTCCCAGTGTA | 4477 |
| Mir21 | GTTTCCTCGGTTCAACACTA | 4478 |
| Mir21 | GAGATCTAAGCGGGACTATG | 4479 |
| Mir21 | GGCCCTGTGAAGGTATCAGA | 4480 |
| Mir21 | GGGACAGTCAGAGAGAGGGA | 4481 |
| Mir21 | GAGCCCTCCCAGTGTAAGGC | 4482 |
| Mir21 | GTTCTGCTTTCTTTCCTACA | 4483 |
| Mir21 | GCAGGAGGGATCCTCACCTG | 4484 |
| Mir21 | GCCTGAGAGAGCTACCTCCA | 4485 |
| Mir218-2 | GACTAAGAGAAGGAAGGAAA | 4486 |
| Mir218-2 | GGTCCTGTAAACACCAAGGC | 4487 |
| Mir218-2 | GTACTAATCACGCTCAGTGG | 4488 |
| Mir218-2 | GGATCCTTTGGGTACAACAC | 4489 |
| Mir218-2 | GTGAGGGCCTTGGTATGAGT | 4490 |
| Mir218-2 | GGACACAACCTCTGATGGGA | 4491 |
| Mir218-2 | GAAGCCAGACGCCCTACCCA | 4492 |
| Mir218-2 | GGAGAAGCTGAAGCCAGAGC | 4493 |
| Mir218-2 | GCTAGGTCACTGCCATGGTG | 4494 |
| Mir23b | GACATTATCGCTTGCCATGG | 4495 |
| Mir23b | GGGCTAGAGCCACTTTGAAT | 4496 |
| Mir23b | GTCTGCAGGAGGCAGTGAAG | 4497 |
| Mir23b | GGTTCTCTGACCTGTAGAGT | 4498 |
| Mir23b | GACAATGGAGACAGAGTAGA | 4499 |
| Mir23b | GAGGGCTGCCAAACGGTCTT | 4500 |
| Mir23b | GCAGGTGTGGTGTGTAGGGA | 4501 |
| Mir23b | GACAGAGTCAAAGTGAGGGC | 4502 |
| Mir23b | GGAGAACAGGGTGTGTCCCA | 4503 |
| Mir6a-2 | GGCCTAAGGAACACTTGTGC | 4504 |
| Mir6a-2 | GATGTCTGCATCACTGTCTC | 4505 |
| Mir6a-2 | GGTCTCTCACCAATGCCTCG | 4506 |
| Mir6a-2 | GATTGGGCTTACTTCTTGTT | 4507 |
| Mir6a-2 | GGCAGTTTCCCTTTGAGGCA | 4508 |
| Mir6a-2 | GTGTTGGCTAGAGGGAAGTG | 4509 |
| Mir6a-2 | GATGTGGGCTAGGAGGGACT | 4510 |
| Mir6a-2 | GATCGGACTGTGTGAGACAA | 4511 |
| Mir6a-2 | GCTGGCTAAGAACTGCTCAG | 4512 |
| Mir6a-2 | GGGTATCTGTGACTCCAGGG | 4513 |
| Mir375 | GCCATTGGGAGGTGAGCAGC | 4514 |
| Mir375 | GGATGCACAAGAAGCTATGT | 4515 |
| Mir375 | GTTCTTAGTTTGGCCAGTGG | 4516 |
| Mir375 | GGGCAAATATTGACTCATGG | 4517 |
| Mir375 | GCTGACACCAGCAAACAGTC | 4518 |
| Mir375 | GATGTTCTGCCTTCGCTAGG | 4519 |
| Mir375 | GAGTGCTCTGAGTCCTGGCT | 4520 |
| Mir375 | GTCAGCATGCACAGGTCAGG | 4521 |
| Mir375 | GGTGGTAGGGCAATGATGCG | 4522 |
| Mir375 | GTGGGAAGATTCTATCTCCA | 4523 |
| Mir7b | GAAGGCCAACTGGACTGTTT | 4524 |
| Mir7b | GGACTCTGAGTCCTTGAACT | 4525 |
| Mir7b | GGAGGGTAAGTCAGTGAGTG | 4526 |
| Mir7b | GTGAGAGAGACTGTGTTAGA | 4527 |
| Mir7b | GCACTTGAGGGTGTTGAACC | 4528 |
| Mir7b | GGTGTTGAACCTGGCGGAGG | 4529 |
| Mir7b | GGTTCATTCTATACACCCTA | 4530 |
| Mir7b | GAGGGACTCGGAGCAGAGTT | 4531 |
| Mir92-2 | GGAGGGAAACCAAGGTAGGT | 4532 |
| Mir92-2 | GGCCTCTGATTAAATCACCA | 4533 |
| Mir92-2 | GTAATGTGTCTCTTGTGTTA | 4534 |
| Mir92-2 | GAGCGGGTCCTGTGTGTCAC | 4535 |
| Mir92-2 | GTGGTGCTGCGCGGACACTT | 4536 |
| Mir92-2 | GCTCTCCTAGCTGGTGGAGG | 4537 |
| Mir92-2 | GCACTGTTAGCACTTTGACA | 4538 |
| Mir92-2 | GATGGAATGTTTGTGTTGAT | 4539 |
| Mir92-2 | GAGCTTTCTCTGGAGGGCTG | 4540 |
| Mir92-2 | GTTGTGTAGAAGAACAAGCT | 4541 |
| Mirlet7a-2 | GGAACATACCATGGTACGGC | 4542 |
| Mirlet7a-2 | GACCCATACAACTCTGCAAG | 4543 |
| Mirlet7a-2 | GAAGACTGTGCAAGAGACTA | 4544 |
| Mirlet7a-2 | GAGGCCAGGTTGAAAGATTG | 4545 |
| Mirlet7a-2 | GGTTTGAGATTGCTCCGTGG | 4546 |
| Mirlet7a-2 | GTTGTATTGTAGATAACTGC | 4547 |
| Mirlet7a-2 | GTTTGAGATTGCTCCGTGGT | 4548 |
| Mirlet7a-2 | GGTCAAAGATTCAAAGAAGC | 4549 |
| Mirlet7b | GGAATAGCTAGAGACCACAT | 4550 |
| Mirlet7b | GTCTGAGGCCTGAAAGAAGC | 4551 |
| Mirlet7b | GCCCAGGTGAGAAGGCTGAG | 4552 |
| Mirlet7b | GGTAAAGACATCTAAGCTGA | 4553 |
| Mirlet7b | GCTAGTCGTTAGGGACAGAC | 4554 |
| Mirlet7b | GCTGCCTGGCTTCCTAGGTC | 4555 |
| Mirlet7b | GGCCCAGGTGAGAAGGCTGA | 4556 |
| Mirlet7b | GCCTAGAGAAAGGCCAGATG | 4557 |
| Mirlet7b | GCAGCAAGGCAGAAGAGGCG | 4558 |
| Mirlet7b | GAGGCGTGACAGTAGACGCT | 4559 |
| Mirlet7i | GGTGTTGCACTGCCTTATCT | 4560 |
| Mirlet7i | GGCGCTGTAAAGATGGCGGC | 4561 |
| Mirlet7i | GCAAGGATGCAGAGAGGAGA | 4562 |
| Mirlet7i | GTATGTATGAAACGTGTAGG | 4563 |
| Mirlet7i | GGACTGGGTGGGTGTGAGGT | 4564 |
| Mirlet7i | GGCAGTGCAACACCGGAACC | 4565 |
| Mirlet7i | GAGAGTAGGGAAACCAGCCG | 4566 |
| Mirlet7i | GGGCGCTGTAAAGATGGCGG | 4567 |
| Mitf | GAAGTCAGCAAATGGTGGTG | 4568 |
| Mitf | GACACTCCTGAAAGTTGGGC | 4569 |
| Mitf | GACACACTGGAAGTGGAATC | 4570 |
| Mitf | GCCATAAGCAGTCAGAATAT | 4571 |
| Mitf | GTGGGATGGACAGATGGAAA | 4572 |
| Mitf | GGGCTGTGTTGGGAAGAAGA | 4573 |
| Mitf | GAATTGTTACAGGGAGAACC | 4574 |
| Mitf | GTCTGGTCTGGACACCTCTT | 4575 |
| Mitf | GTAAGCTGTCTGTTGAGACT | 4576 |
| Mitf | GCTGACCTCAGCCTGGTAAA | 4577 |
| Mixl1 | GCGCCTTTGATGGTGACAGG | 4578 |
| Mixl1 | GGGAGGCGCGAACTTGAGTC | 4579 |
| Mixl1 | GAATTCTTCAACCTGCTACG | 4580 |
| Mixl1 | GTAAGGTCTAGCACATAGCA | 4581 |
| Mixl1 | GCTTGACCTGTCCACCAGCT | 4582 |
| Mixl1 | GCTAGGCTGTTTAACCAACC | 4583 |
| Mixl1 | GAAGAAGAAAGAAAGGGAGA | 4584 |
| Mixl1 | GGGCAGACAGAAGGTGGCAG | 4585 |
| Mixl1 | GGATTGGTGGTTGGACTGGC | 4586 |
| Mkl1 | GAACCACGAGTGTACGCTAT | 4587 |
| Mkl1 | GGGAAGGATGAGACTGCCCT | 4588 |
| Mkl1 | GGCAAATAGCAGTTGGATTC | 4589 |
| Mkl1 | GACCTCCTCCCACCTCTTGG | 4590 |
| Mkl1 | GTTAGGGCTAGCCCGATTTA | 4591 |
| Mkl1 | GCTCTTAAACACCGTGTTCT | 4592 |
| Mkl1 | GGCAGAGAGAGAGGCGTCAT | 4593 |
| Mkl1 | GTGCTTCACCAGAAAGAGTC | 4594 |
| Mkl1 | GGCATTTATTGTGTCCTTTC | 4595 |
| Mkl1 | GAAGTCTGGAACTGGCGGAG | 4596 |
| Mlx | GCGGCTTAACTGTCCCACTT | 4597 |
| Mlx | GCAATGAGGACACAGCTAAT | 4598 |
| Mlx | GATGACACACGGGTCAGGAA | 4599 |
| Mlx | GTTCAGGAACTTGTCTGTGG | 4600 |
| Mlx | GCATCTGACTGAGTTCCTGG | 4601 |
| Mlx | GGCCCATAGGGATCCAGCAG | 4602 |
| Mlx | GACTGAGCCTCGCCTCTTCC | 4603 |
| Mlx | GAACAGGTACTAGCCAGAGA | 4604 |
| Mlx | GGTCCAGATACCTCAGTCTC | 4605 |
| Mlx | GAGGCTGAAGCAGGTTTCCC | 4606 |
| Mlxip | GGACTCAGTTCCGGGTATGG | 4607 |
| Mlxip | GCACTCCACGTGGTGGGTAG | 4608 |
| Mlxip | GCTGAAGTTGTTGGGTCTGG | 4609 |
| Mlxip | GTTTAAGAGCGGTGATGCCC | 4610 |
| Mlxip | GTGGCTGAAGTTGTTGGGTC | 4611 |
| Mlxip | GGCACTCCACGTGGTGGGTA | 4612 |
| Mlxip | GGAGCTTGGGAATAGCCCTG | 4613 |
| Mlxip | GGAGAAAGCTGGCCTAATGT | 4614 |
| Mlxip | GAATTGCAGTAAAGACAACT | 4615 |
| Mlxip | GCCCAGAAGCCAAATTCCAA | 4616 |
| Mlxipl | GTTAGACTGTAGAGAGGCAC | 4617 |
| Mlxipl | GGCTGTGAACTCTGGGCATC | 4618 |
| Mlxipl | GGACAATCATAAGAGCGCCT | 4619 |
| Mlxipl | GGCCTCTCTTTCCCACTAGA | 4620 |
| Mlxipl | GGAGAGCAACCGATGGTTGG | 4621 |
| Mlxipl | GGCATCGGGTACTAGAGGGC | 4622 |
| Mlxipl | GCTAACCTTTCCACTGGGAC | 4623 |
| Mlxipl | GAACTTTGCTGTAGAGGCAT | 4624 |
| Mlxipl | GACATAGCTAACCTTTCCAC | 4625 |
| Mnt | GGAAATGGAGACATGCCAGT | 4526 |
| Mnt | GAGGAATAGCACAAGACAGA | 4527 |
| Mnt | GCCTGGTGATCTAGCCTAAT | 4628 |
| Mnt | GGGAATTGCGACAGACCGGA | 4629 |
| Mnt | GTCTGGGTCAGGAGGGCAAC | 4630 |
| Mnt | GTATGTTTATAGGTAAGACC | 4531 |
| Mnt | GCACTGGAGCTGTAAGTGTG | 4632 |
| Mnt | GAAGAGGGAAATGAATGGGA | 4633 |
| Mnt | GGGAGGGTAATGTAAAGCAG | 4634 |
| Mnt | GGAAGGGTGAGACACCTACA | 4635 |
| Msc | GGCTTTGTTAACAAACAGAC | 4636 |
| Msc | GAGTAATGAACTTGAATGAC | 4637 |
| Msc | GATTGCTTAAACTTGACTGT | 4638 |
| Msc | GGTGCAGGCAGAAAGATGGA | 4639 |
| Msc | GTAGTGAGCAGCTGCAGCTT | 4640 |
| Msc | GAAGTATCATAGCAGGTGGC | 4641 |
| Msc | GATGTGTGTTTGCTTATCCA | 4642 |
| Msc | GGCAGAAAGATGGAAGGCAG | 4643 |
| Msc | GGGCTGCTTGGTAGTCCTTT | 4644 |
| Msx1 | GTTATTTGTCAGAGTAGCAA | 4645 |
| Msx1 | GCCGATTTACACTCTGCGCT | 4646 |
| Msx1 | GGGTAATTATCCGAGCACGG | 4647 |
| Msx1 | GGAGGTATATCTTTGGTGCA | 4648 |
| Msx1 | GCAACTGTGTAGACAACTTC | 4649 |
| Msx1 | GATGCCCACCTGACTTAGCT | 4650 |
| Msx1 | GAGCCTCACATCTGCCCACA | 4651 |
| Msx1 | GGGCTGCCGTGGCCATTTAG | 4652 |
| Msx1 | GAGGTGATTGGCGGCTCACC | 4653 |
| Msx1 | GAGCAAAGAGGCCTAGCCTC | 4654 |
| Msx2 | GAGAAGGCTGTAGACGGGCC | 4655 |
| Msx2 | GCCAGAGCTTGGTACTCTGG | 4656 |
| Msx2 | GCACCAGAAACACTTTAAAG | 4657 |
| Msx2 | GAATGTTGGAAATCTGCGGA | 4658 |
| Msx2 | GCCTAGAGAGGAGACTCAAG | 4659 |
| Msx2 | GACTGTATCTCTGCCTAACC | 4660 |
| Msx2 | GGTGCTGGAGGGAGTATTTA | 4661 |
| Msx2 | GACACTGAAAGGGAAACGGT | 4662 |
| Msx2 | GTTGGAGAGGCGCCTGGCAA | 4663 |
| Msx2 | GAGGCGCCTGGCAAAGGGAT | 4664 |
| Msx3 | GATGAGTGTTTACCAAGGAG | 4665 |
| Msx3 | GGGCTAGAAAGACGCGTCCT | 4666 |
| Msx3 | GTCGACAGCAATGACTCATT | 4667 |
| Msx3 | GATGCAGTCTTTCCTTGACC | 4668 |
| Msx3 | GTCATCAGTTTGTGGACAAT | 4669 |
| Msx3 | GTCCATTCCTCCACTCCAGA | 4670 |
| Msx3 | GCCTCAGCCTTCTGGAGTGG | 4671 |
| Msx3 | GATCTCTTGAGGTCGAGTTG | 4672 |
| Msx3 | GGGCTACAGGGTAGGAGTGG | 4673 |
| Msx3 | GGGCTGAGTCTTCAATGGTG | 4674 |
| Mtf1 | GCTCAGGTAGAAGAAACAGG | 4675 |
| Mtf1 | GCCACAAAGGACTAGCTGCC | 4676 |
| Mtf1 | GAACTGGIGAATAAACTCTT | 4677 |
| Mtf1 | GCCTTGGAGTTGAGCAGAAA | 4678 |
| Mtf1 | GATGCTCAGTACGGGATATG | 4679 |
| Mtf1 | GCTTGGACAGTGGAAGCATC | 4680 |
| Mtf1 | GTTCTTGAGCTGAAACAGGT | 4681 |
| Mtf1 | GCAAGGGAGAAGAGAAGGGA | 4682 |
| Mtf1 | GGTTCCAACCTTCCTTAAGG | 4683 |
| Mtf1 | GGACTAACTGAAGTCCCTGA | 4684 |
| Mxd1 | GGCAATGACCTCCACCCAGC | 4685 |
| Mxd1 | GTTATAGGAGAGGACTGAGC | 4686 |
| Mxd1 | GTGACGTCATCGTAGCCGGG | 4687 |
| Mxd1 | GACAGTGGGCAACAGGTCGG | 4688 |
| Mxd1 | GGGATGGAAGGGATGGCCTC | 4689 |
| Mxd1 | GCGGTTTGAATTTAGTTCTG | 4690 |
| Mxd1 | GAGGTGACGTCATCGTAGCC | 4691 |
| Mxd1 | GAGTATCTAGCGCCATCTAC | 4692 |
| Mxd3 | GGTAGCCATACCTATGAGTC | 4693 |
| Mxd3 | GAGCAATCTGTAGCAGGAGA | 4694 |
| Mxd3 | GGCTGTTACCTATACCTCCT | 4695 |
| Mxd3 | GCTCCTCCTTCTCTTCCAAG | 4696 |
| Mxd3 | GCATCAGTTCTACTGCAGCA | 4697 |
| Mxd3 | GTAACAGTTTGTAGACTGAA | 4698 |
| Mxd3 | GAAGGACGGGAGAGCTAGGA | 4699 |
| Mxd3 | GTCCTGTCTGCCTCTGCTAC | 4700 |
| Mxd3 | GGCCCTATCTACATATTCAT | 4701 |
| Mxd4 | GCGTTCGGCCAGTCCCTATT | 4702 |
| Mxd4 | GCAGAATGAGCTGGCTTCCC | 4703 |
| Mxd4 | GACAGCAAGCCTGCTGCTCA | 4704 |
| Mxd4 | GATTGTGGGCTTGGTCAGAG | 4705 |
| Mxd4 | GTAGGCATTGCACGCCGATT | 4706 |
| Mxd4 | GTGCCATCTTCCCTCACAAA | 4707 |
| Mxd4 | GATCCGTGAGTGTCTGTTTG | 4708 |
| Mxd4 | GACATGTGTGGCTCACACCC | 4709 |
| Mxd4 | GTCTGGGCTCTGTCTATACA | 4710 |
| Mxd4 | GTTTGCGGTGCTTGGTCTGA | 4711 |
| Mxi1 | GGTGTGTCCACGCATACATG | 4712 |
| Mxi1 | GGGCGGGACTACATTTCCCA | 4713 |
| Mxi1 | GCTAGGATTTGCGGAGAGGC | 4714 |
| Mxi1 | GTCTCCAGGCTACCCTGTCC | 4715 |
| Mxi1 | GGAGGGAAGAAGAGGTTCCT | 4716 |
| Mxi1 | GGAAAGACTACATCTCCCGG | 4717 |
| Mxi1 | GACTTTATTTACTGAGAGGG | 4718 |
| Mxi1 | GTCTCTGGGCTGGTGAGGAC | 4719 |
| Mxi1 | GATCATCCGCACCCGCTCCA | 4720 |
| Mxi1 | GAATGAACCTACAGGACGGA | 4721 |
| Myb | GGATTCAAGAGGCTCAGGAA | 4722 |
| Myb | GTCCAGCAAGTGTTTGACGC | 4723 |
| Myb | GTGAGTGTCCCAAGTGCTTT | 4724 |
| Myb | GGAAGAGAATGCTTCTGTAA | 4725 |
| Myb | GGATGCAATAGATGCAACTT | 4726 |
| Myb | GGCGTGTGTCTAAGTGAGGG | 4727 |
| Myb | GTGGTAGGCACCTCCTAGGG | 4728 |
| Myb | GCTCCCGGGTGTGTTGAAGT | 4729 |
| Myb | GTTCAAGACTTGTGCTGACT | 4730 |
| Mybl1 | GCCGTTTGAATCTGCGCACG | 4731 |
| Mybl1 | GGCCAGTTTCCTTGTCCTTT | 4732 |
| Mybl1 | GCTGTGAGTCTCGCCACTTA | 4733 |
| Mybl1 | GGTGACAGGACACGGAACGC | 4734 |
| Mybl1 | GAGTAACTGAAATCTTGCAT | 4735 |
| Mybl1 | GCAACTTCTCAACAGTTACA | 4736 |
| Mybl1 | GAAGAACACTTGAAGTTCTC | 4737 |
| Myc | GACGAACGAATGAGTTATCT | 4738 |
| Myc | GGATACCGCGGATCCCAAGT | 4739 |
| Myc | GAGCTCCTCGAGCTGTTTGA | 4740 |
| Myc | GAATTGCCAACCCAGATCTG | 4741 |
| Myc | GATGACCGGAAGCTTGTCTT | 4742 |
| Myc | GAAGTCCGAACCGGAGGTGC | 4743 |
| Myc | GCCCGAACAACCGTACAGAA | 4744 |
| Myc | GACGAGCGTCACTGATAGTA | 4745 |
| Myc | GCCTTGGCTTCAGAGGCTGA | 4746 |
| Mycl | GACTGTTCGAGAGGCTCCCG | 4747 |
| Mycl | GTCTAACTACTCAGAACTAC | 4748 |
| Mycl | GCTAATGGTTACTGAAGCAA | 4749 |
| Mycl | GTGCGTCCCACCCATGACAG | 4750 |
| Mycl | GAACACTATCAAGATCTCGC | 4751 |
| Mycl | GGGAAGTAGACTAGCAGGGT | 4752 |
| Mycl | GGACGCACCTGAACCTGGTG | 4753 |
| Mycl | GACCAGTTCAGCCAGGAGGT | 4754 |
| Mycl | GAGGATGAATTCTGGGAGGC | 4755 |
| Mycs | GACCTGGTGGGTGGATTCAA | 4756 |
| Mycs | GCTCTCAAGAGCATCTTCCC | 4757 |
| Mycs | GGCACAGGACATGATGCTCC | 4758 |
| Mycs | GCACAGGACATGATGCTCCT | 4759 |
| Mycs | GTGGATTCAAAGGAGGGTGG | 4760 |
| Myef2 | GGTTAAGGGAATGATCACTT | 4761 |
| Myef2 | GCTAGTAATAGTAACCAGAT | 4762 |
| Myef2 | GGAGAATTTAATTCCCTCAC | 4763 |
| Myef2 | GCCTTTGGATGAGAGGACTA | 4764 |
| Myef2 | GCTTATGATAATCTAGAACT | 4765 |
| Myef2 | GTGAATTCATAAAGAGCTAA | 4766 |
| Myef2 | GGACACTAGAGCTCTGCTGG | 4767 |
| Myef2 | GAGTTCAATGTTGCCTTCTG | 4768 |
| Myef2 | GAACTGAAATGCCTCAGCCG | 4769 |
| Myef2 | GGGACAATTTAGCTGGAAGA | 4770 |
| Myf5 | GAACAATAAATCAACCGTGC | 4771 |
| Myf5 | GGAAGGATGGAAGCTCGGAG | 4772 |
| Myf5 | GGGAAGGATGGAAGCTCGGA | 4773 |
| Myf5 | GGAGGTTGGTCCCTGTAGCT | 4774 |
| Myf5 | GTCCCAAAGGGCCCTCCACA | 4775 |
| Myf5 | GACACGTGTGCTGGGAAGGA | 4776 |
| Myf5 | GTTTGTGTACTGGTAACAGT | 4777 |
| Myf5 | GGTTAGGGCTGTCTTTGGTA | 4778 |
| Myf6 | GAATCCTAAGCAACCAACTT | 4779 |
| Myf6 | GAATTCAGTTGAACTCTGGA | 4780 |
| My46 | GGGCTGGAATTGGAGTGTGT | 4781 |
| Myf6 | GTGAACTAATGTTTACTGCA | 4782 |
| Myf6 | GGTATGCAACCGCATTAACT | 4783 |
| Myf6 | GAATTATGAGAAGACAGAGC | 4784 |
| Myf6 | GATGACTCTCTGTCTTGATA | 4785 |
| Myf6 | GCACTAATTAAATGCCATCT | 4786 |
| Myf6 | GTGTTAACTATAAGCTGTTT | 4787 |
| Myocd | GGTACATCTCCAGAACGCGC | 4788 |
| Myocd | GATGGATGGGTAGGGAGGCA | 4789 |
| Myocd | GCTTACTGCAGGGCTCTGGA | 4790 |
| Myocd | GCAGCTGACTTCTGCCCTCC | 4791 |
| Myocd | GGAGTGTATCTGCTTGTCCT | 4792 |
| Myocd | GTCTTTCTGACCCAGAGGGA | 4793 |
| Myocd | GGTCCCTTTCCCACTATGAA | 4794 |
| Myocd | GACTAATCTCTGCCCTGATC | 4795 |
| Myocd | GTTTCACAGAGTTTCCTCCA | 4796 |
| Myocd | GGCAGCCTATGACATCAGCC | 4797 |
| Myod1 | GCTGGTTATGCTATGCAAGC | 4798 |
| Myod1 | GCAAAGCCAGAGAAGGTTGC | 4799 |
| Myod1 | GCATGAACATCCCAGGGTTG | 4800 |
| Myod1 | GAGCTGGAAAGGGAGGCTGG | 4801 |
| Myod1 | GGTGCTCATGGCCACTCAGA | 4802 |
| Myod1 | GGAGCCATTAAGAAGAATGG | 4803 |
| Myod1 | GGACAGAAAGGTGATCCATT | 4804 |
| Myod1 | GGTCTCCAGAGTGGAGTCCG | 4805 |
| Myod1 | GGATGTGGAAATGTCAGTGG | 4806 |
| Myod1 | GAGATCTGGCAGAGGGCTCT | 4807 |
| Myog | GCTGGGTGAAAGGTGGCCAG | 4808 |
| Myog | GCTGGTGGACAGGGCAGGAA | 4809 |
| Myog | GCGTTGGCTATATTTATCTC | 4810 |
| Myog | GTCCAAGGCAGCTGGTGGAC | 4811 |
| Myog | GCAGGAAGGGAACAAGAAAG | 4812 |
| Myog | GAAAGGAGCAGATGAGACGG | 4813 |
| Myog | GATTGAAGTAAGAGAACACA | 4814 |
| Myog | GCTTCTTCACTTTGAGGAGG | 4815 |
| Myog | GGCAAAGACAGAAACCCAGA | 4816 |
| Myog | GAGAGAGTAGGCAGGAGGCC | 4817 |
| Mzf1 | GTTGTATCTGACCTGAATTC | 4818 |
| Mzf1 | GCAAACCAGGAAGTCTCTTA | 4819 |
| Mzf1 | GTGAGACATCGAAACTCTAG | 4820 |
| Mzf1 | GATTAGAACCACAACTCTCA | 4821 |
| Mzf1 | GCTTTCTGGGAGTCGTAGTT | 4822 |
| Mzf1 | GAGGTAATGTTTAAGTAGTC | 4823 |
| Mzf1 | GCGGGACTCCATGGTAACTA | 4824 |
| Mzf1 | GTTTGGTCCCTTAGTTACCA | 4825 |
| Mzf1 | GGAAGAAGAGAGAAGCAGAA | 4826 |
| Mzf1 | GGTAACTAAGGGACCAAACC | 4827 |
| Nab1 | GTAAGGTAACAATTATGGAG | 4828 |
| Nab1 | GTGTCCTCAGAACTTAACTT | 4829 |
| Nab1 | GTCCTTCCTTGTTTATGTTC | 4830 |
| Nab1 | GGAGTTGCTGTTGAAGTCAC | 4831 |
| Nab1 | GGAGCATAAACACTGACAAT | 4832 |
| Nab1 | GAGTTTAGGAATGGGAAGGA | 4833 |
| Nab1 | GCCCAGAACATAAACAAGGA | 4834 |
| Nab1 | GGTATCCTTAAGGCTCTTTC | 4335 |
| Nab1 | GTGGAAAGGTAGAGGTTAAT | 4836 |
| Nab1 | GGCCAGCCAGGAAGTGGGAA | 4537 |
| Nacc1 | GTTGGATCCTGTGAGCGGAA | 4838 |
| Nacc1 | GAGTCAAGAACAGAAGAGTG | 4839 |
| Nacc1 | GTTTGTCCGGGTGTGTGTGT | 4840 |
| Nacc1 | GGAACAGTTTAGGCTCTTTG | 4841 |
| Nacc1 | GCCTGAACCTCCACTCACTC | 4842 |
| Nacc1 | GATCACAGCACACCTGGAGG | 4843 |
| Nacc1 | GTCTGTGTGAATACAACTAC | 4844 |
| Nacc1 | GCAGTAAGGAAGGGACTTTA | 4845 |
| Nacc1 | GAGCCACTCAGACTGAGTGT | 4846 |
| Nacc1 | GAACCGAAGCGCTCGAAGCG | 4847 |
| Nanog | GTGGGAAGTTTCAGGTCAAG | 4848 |
| Nanog | GGGAAGTTTCAGGTCAAGTG | 4849 |
| Nanog | GCTTTCCCTCCCTCCCAGTC | 4850 |
| Nanog | GTGAATTCACAGGGCTGGTG | 4851 |
| Nanog | GCGCTCTGCGTTTCTCCAGC | 4852 |
| Nanog | GGAAGTTTCAGGTCAAGTGG | 4853 |
| Nanog | GGGATTAACTGTGAATTCAC | 4854 |
| Nanog | GCTGTAAGGTGACCCAGACT | 4855 |
| Nanog | GGAGGGAGGGAAAGCTTAGG | 4856 |
| Ncoa1 | GGGACGCTAAGGGACACTCT | 4857 |
| Ncoa1 | GTACCACTCACTGTTCTCTC | 4858 |
| Ncoa1 | GTGGTACTGTAAAGAAGGTG | 4859 |
| Ncoa1 | GAGAACAGGTAGAAAGAATG | 4860 |
| Ncoa1 | GACCAGGAAACAGACTCCAC | 4861 |
| Ncoa1 | GTCTTAAGGAAGTGTGAGAA | 4862 |
| Ncoa1 | GGAATGAACACAGGGATGGA | 4863 |
| Ncoa1 | GCTCATTTGTAAGCACCAGA | 4864 |
| Ncoa1 | GTCCCTTAGCGTCCCTGAGC | 4865 |
| Ncoa2 | GTCCTCAGCATCTCCCTGGC | 4866 |
| Ncoa2 | GAAGAAATCTAAGTGGCAAT | 4867 |
| Ncoa2 | GAGCGGTGACAGCGTTCGCT | 4868 |
| Ncoa2 | GCTGTAACAAATGTTAACAT | 4869 |
| Ncoa2 | GGTCTAGGGACCGTGACCTA | 4870 |
| Ncoa2 | GGGATTGCCTGACAAAGCAA | 4871 |
| Ncoa2 | GACAGGAGAAGAAATCTAAG | 4872 |
| Ncoa2 | GCTTAGTCTGGAGAATGAGA | 4873 |
| Ncoa2 | GTGCACTGAGTAACACAGCA | 4874 |
| Ncoa3 | GCAGGGATTTAAAGCCAAGT | 4875 |
| Ncoa3 | GAGGTTCTGCTGTCACCTCA | 4876 |
| Ncoa3 | GCCTGTGACTTGTGTTTCCT | 4877 |
| Ncoa3 | GATGGTGGCAAGGGCATGTG | 4878 |
| Ncoa3 | GGCAGACATGCCGCTGCTTT | 4879 |
| Ncoa3 | GAGTGAGGTCTCAGAACAGA | 4880 |
| Ncoa3 | CATGTAAAGAACAGACCACC | 4881 |
| Ncoa3 | GTACAAGAAGGCTGTGTGCA | 4882 |
| Ncoa6 | GCTCTTACATGAAGCTACTT | 4883 |
| Ncoa6 | GGAAACTACCTATAGATATT | 4884 |
| Ncoa6 | GGCTCTTACATGAAGCTACT | 4885 |
| Ncoa6 | GCTTTCCTTTCAGTGCAGGT | 4886 |
| Ncor1 | GTTTGTTCTTTCTCAGATGG | 4887 |
| Ncor1 | GCATGCTTGCTTACTGTGAG | 4888 |
| Ncor1 | GTGCCTGACCTGTTATCCTG | 4889 |
| Ncor1 | GATTCCGCCACCGAGGAGAC | 4890 |
| Ncor1 | GCCGTGGCTGTCCTGACTTG | 4891 |
| Ncor1 | GGAACTCAGCGGAACGAATG | 4892 |
| Ncor1 | GTCCAGTCATCACCATATTT | 4893 |
| Ncor1 | GTAGGAGGGTCGCTGGGTTA | 4894 |
| Ncor1 | GTTCCGCTGAGTTCCAAACC | 4895 |
| Ncor2 | GAAGGAGAAGCCATGGAGGC | 4896 |
| Ncor2 | GGCTTTGCCTTATAGAGACT | 4897 |
| Ncor2 | GGAAGTTCATTTCAGCCTTT | 4898 |
| Ncor2 | GGCAAGGTGTGCTGAGGTGG | 4899 |
| Ncor2 | GTTAAAGATCTAAGGCAGAG | 4900 |
| Nccr2 | GTAGGAGCCAGGGAGGACAA | 4901 |
| Nccr2 | GCTGGGTAGCGGCACTACTC | 4902 |
| Ncor2 | GAGCCCTCACATTGCCAGCC | 4903 |
| Ncor2 | GAGTCATCCTCGCCATCCCA | 4904 |
| Ncor2 | GTTCTAGCTTTAAGCCTGCC | 4905 |
| Neurod1 | GCATAGTTCTTGGATACCTT | 4906 |
| Neurod1 | GTTATCTCCGCTTGCCTGAC | 4907 |
| Neurod1 | GTCGCCAGTTAGAGACTCCG | 4908 |
| Neurod1 | GCGCATAAGAACAAGGCAGC | 4909 |
| Neurod1 | GGTAGGAGCAGGTGACCGTT | 4910 |
| Neurod1 | GGTCGGGCTACCTAACTCCA | 4911 |
| Neurod1 | GTAACTGCAAGGCCCTTAGA | 4912 |
| Neurod1 | GAACTATGCTGGGTAACAGT | 4913 |
| Neurod1 | GTCAGAACCTTGCCTTCTAA | 4914 |
| Neurod1 | GTGAAAGTATGTGTGTGTTG | 4915 |
| Neurod6 | GTGCATCTGGGTACCAGGGA | 4916 |
| Neurod6 | GATTAGAAGAGCCACTCTGG | 4917 |
| Neurod6 | GTGTCTGTGTGTAAACCTGG | 4918 |
| Neurod6 | GAGGGTTCATCCAGGATTCA | 4919 |
| Neurod6 | GAGAGGGAAAGTTTCATATG | 4920 |
| Neurod6 | GTAGAGCTAAAGTGAGTCTT | 4921 |
| Neurod6 | GTTGTAACATGGGAGATCCA | 4922 |
| Neurod6 | GTGTCACCGCTATGATTCTT | 4923 |
| Neurod6 | GTGCTGCTGCCACATGTCAA | 4924 |
| Neurog1 | GGCTGCTGGGAGTTGTGCAA | 4925 |
| Neurog1 | GTGCACTACTGAATCCAAGA | 4926 |
| Neurog1 | GTCAATCAGTAGCAGGCAAA | 4927 |
| Neurog1 | GATTGGCCGGCGGTAATTAC | 4928 |
| Neurog1 | GAATTGTCACAAGGTCAGAC | 4929 |
| Neurog1 | GAGCAAGATTTCAGGAGAAG | 4930 |
| Neurog1 | GCATAATTTATGCTCGCGGG | 4931 |
| Neurog1 | GCTGTCACAGGGACAGAAAG | 4932 |
| Neurog1 | GGCCCTGTATTTATTTCTTT | 4933 |
| Neurog1 | GGCTGGCTGTCTATTAAGTC | 4934 |
| Neurog2 | GAATAAAGGATGGGAACAGT | 4935 |
| Neurog2 | GTTTCCTCTCAAGTCCAGCA | 4936 |
| Neurog2 | GTATGACCTCTGCTCCGCTC | 4937 |
| Neurog2 | GTCACGTACGTGTGCCAGAC | 4938 |
| Neurog2 | GGACTTCAACACACGCCATC | 4939 |
| Neurog2 | GATGAAAGGAGAGTCTTGGG | 4940 |
| Neurog2 | GAGGGCTACGGAGCAGGATT | 4941 |
| Neurog2 | GCCAAACAGACCCTTAGTGG | 4942 |
| Neurog2 | GAAACGTGTCTATGACTGTT | 4943 |
| Neurog3 | GGGAGGTGGTAGGATTGGGT | 4944 |
| Neurog3 | GGATTCCGGACAAAGGGCAG | 4945 |
| Neurog3 | GCCCATTAGTCTCACGGGAT | 4946 |
| Neurog3 | GTGAAGCTGCTAGTCCTCTC | 4947 |
| Neurog3 | GCATGGGAGGAAGCTATGGC | 4948 |
| Neurog3 | GGGTAGACCTTCCTGTGAAC | 4949 |
| Neurog3 | GAGGACAGAGTGACCAGAGA | 4950 |
| Neurog3 | GCCCTTTAAGTCACTTTCCC | 4951 |
| Neurog3 | GACAATGTCTTAAGGCTCAC | 4952 |
| Nf1 | GTATCTTCCTATGTGGCTAA | 4953 |
| Nf1 | GCCATGCATAGTGGTGTGAC | 4954 |
| Nf1 | GGGAATTCTAGTCTCCAACT | 4955 |
| Nf1 | GGCAATGACAGCCTACGCAC | 4956 |
| Nf1 | GTCCTTCAAACTCTGGTTCT | 4957 |
| Nf1 | GGCCCAGTGGTGATCCAAGT | 4958 |
| Nf1 | GTCTCGGACTGTGATGGCTG | 4959 |
| Nf1 | GATGGTGTGTGTGTGTGTGG | 4960 |
| Nf1 | GAGCAAGAAGCCAGCAGTGA | 4961 |
| Nf1 | GAAAGGATCCCACTTCCGGT | 4962 |
| Nfat5 | GTGTCCTCCTAAGTACACCA | 4963 |
| Nfat5 | GTGTTATGGGCCAACGTGTT | 4964 |
| Nfat5 | GGGAATGGAGTTCCACAGCT | 4965 |
| Nfat5 | GTGAATGGTCGAATTTACTC | 4965 |
| Nfat5 | GCTAATGTCAATGACAGTTT | 4967 |
| Nfat5 | GTGTAATGCACACGCGTGCG | 4968 |
| Nfat5 | GTATCAGAIGTTCAGATGAA | 4969 |
| Nfat5 | GCTGATCCCGGGCTGGGAAA | 4970 |
| Nfat5 | GAGCTGATTTGTAGCCAGGA | 4971 |
| Nfat5 | GACCTGGATGTCAGCCAGGA | 4972 |
| Nfatc1 | GGGACGAAACGGGAAGGAAA | 4973 |
| Nfatc1 | GCCGCTTGTTTATGTAAACC | 4974 |
| Nfatc1 | GGACCCAGTACAGGGCTGAC | 4975 |
| Nfatc1 | GACTCCTGGGAAAGAGTTGA | 4976 |
| Nfatc1 | GACCAGCCGGACGCATTGAG | 4977 |
| Nfatc1 | GGCTAACTTGAGCATCACGT | 4978 |
| Nfatc1 | GCTAGATGCTGCTGGAAGAG | 4979 |
| Nfatc1 | GACGGAACGGATTGGAGGGT | 4980 |
| Nfatc1 | GGCCGTGGGAAAGCACCTTG | 4981 |
| Nfatc1 | GTCTTGAGACAGCCAGACCC | 4982 |
| Nfatc2 | GTCTCTTTGGAGGGTGGCCC | 4983 |
| Nfatc2 | GCTTCTGCTGGTTTCTCTCC | 4984 |
| Nfatc2 | GTTTGCACGCAGCTCCTGCA | 4985 |
| Nfatc2 | GAGATAAAGCCAGCTTTGAT | 4986 |
| Nfatc2 | GCGTAAACACATGCGTTGCC | 4987 |
| Nfatc2 | GTTTGTAGAAACCTATGCCT | 4988 |
| Nfatc2 | GGTGATGACTCACTAGCCCT | 4989 |
| Nfatc2 | GCACAGTAAGAGGAGATTGG | 4990 |
| Nfatc3 | GAAGTTGGTATGGAGGGATG | 4991 |
| Nfatc3 | GGAGCTCATGTCGAGGAAGT | 4992 |
| Nfatc3 | GGTGAAAGGAGTATGCATGT | 4993 |
| Nfatc3 | GTGAAAGGAGTATGCATGTT | 4994 |
| Nfatc3 | GCTACAGGAGTAGTAGAAAC | 4995 |
| Nfatc3 | GCGATAGGTCGGTGAGGAGG | 4996 |
| Nfatc3 | GATGGTGAGCAAGAGCTTTA | 4997 |
| Nfatc3 | GCTACTAAGTGAGCCTCAGG | 4998 |
| Nfatc3 | GCATTCAGATCAGCAGGAAG | 4999 |
| Nfatc3 | GGGAACCCACGTAGGCCAAT | 5000 |
| Nf8tt4 | GGAGAACAGACCCGGAAACT | 5001 |
| Nfatc4 | GGTCTTCCAGACGAGGGAAG | 5002 |
| Nfatc4 | GGCAGGGAGGAGAAGCTTGG | 5003 |
| Nfatc4 | GGCTCTGAGCTGCTCTGTAG | 5004 |
| Nfatc4 | GACAGTGAGGTGCCCTTTCT | 5005 |
| Nfatc4 | GTGGTGGCTAAGAACTGCAA | 5006 |
| Nfatc4 | GGAGATTTGCCAGGTTTATT | 5007 |
| Nfatc4 | GAAACACTGCCCAGGATCAA | 5008 |
| Nfatc4 | GAACTGCAAAGGCTCCTTGG | 5009 |
| Nfatc4 | GTAACCTGAGAAGAACCCAA | 5010 |
| Nfe2 | GATCCTCAAGGAGTGTGTTG | 5011 |
| Nfe2 | GGGAATATGGAGGCAGGATG | 5012 |
| Nfe2 | GACAGAGCTCTGCCTTGGGA | 5013 |
| Nfe2 | GACACTATGGGAACTTGCTA | 5014 |
| Nfe2 | GGGCAATTTCCGCCAGAACT | 5015 |
| Nfe2 | GAAGTGGGCTGTAATGCCTC | 5016 |
| Nfe2 | GCAAATTGGACTCAGATACC | 5017 |
| Nfe2 | GTCTATGCAATCCACTCAGG | 5018 |
| Nfe2 | GGGATGGCTTTATAGCAAGA | 5019 |
| Nfe2 | GTGTCTCCTAAAGACCGACA | 5020 |
| Nfe2l1 | GTGGGTAACTGGCATATCTG | 5021 |
| Nfe2l1 | GAATTGTTGGTCATTGTGAT | 5022 |
| Nfe2l1 | GGGTGGTGCAGTGAGAGTCC | 5023 |
| Nfe2l1 | GACTAGCCATCGTCTTCTTA | 5024 |
| Nfe2l1 | GTAAACTCCCTTTAGCTCCT | 5025 |
| Nfe2l1 | GGCAGCCTAGGTAACAAGTT | 5026 |
| Nfe2l1 | GCTAGGTAACAGGCGGTGGG | 5027 |
| Nfe2l1 | GACCCTCAAGGACGGAATCT | 5028 |
| Nfe2l1 | GGGTACCGGTTTCCGTTGCC | 5029 |
| Nfe2l1 | GCAGCTAGGTAACAGGCGGT | 5030 |
| Nfe2l2 | GATGTTTGTATGCGACAGTG | 5031 |
| Nfe2l2 | GGTTCTGCAGGTCCAAATCA | 5032 |
| Nfe2l2 | GTGAGACATCTAAGGCAAGA | 5033 |
| Nfe2l2 | GAGATTACTGTATGACCTTG | 5034 |
| Nfe2l2 | GGCATTCCTTTCTTCACCTC | 5035 |
| Nfe2l2 | GAGAGGAGGATCAACAGTGG | 5036 |
| Nfe2l2 | GGCAGTTAAAGAAGTATGTT | 5037 |
| Nfe2l2 | GCTCTCCTGCCGACAGAGGT | 5038 |
| Nfe2l2 | GGAGCTGCCACTCCCTGATT | 5039 |
| Nfe2l2 | GGGCACGTGGGAGAAGTGGA | 5040 |
| Nfe2l3 | GTGGTCCAGGTCACTACCAC | 5041 |
| Nfe2l3 | GGAAAGTTGGAGAAGTTGGG | 5042 |
| Nfe2l3 | GGGTGGGAGTGGAGGAAAGT | 5043 |
| Nfe2l3 | GTGCTGCAATGCTGGCAGCT | 5044 |
| Nfe2l3 | GCTGCCAGCATTGCAGCACT | 5045 |
| Nfe2l3 | GTCACTACCACAGGGCTGCC | 5046 |
| Nfe2l3 | GCAATCTCCAACAGCACACG | 5047 |
| Nfe2l3 | GGAGAAGTTGGGAGGAGACA | 5048 |
| Nfe2l3 | GGACACACTCATATCTGTTC | 5049 |
| Nfia | GATAGGAGAGAAAGCAGGAG | 5050 |
| Nfia | GCAAAGGCTGTAGTTGGAAC | 5051 |
| Nfia | GCCAACTGAACCAGAAAGCA | 5052 |
| Nfia | GTAGTTATATAGGCTAGTGT | 5053 |
| Nfia | GATGCCGTAGAAATGAATTC | 5054 |
| Nfia | GTTCACAATCTTGAGGAGGG | 5055 |
| Nfia | GAAACAACAGTGGTTTAGCT | 5056 |
| Nfia | GGATTTACCCTTCCTAACAA | 5057 |
| Nfia | GCATAGGACATTCGGGATCC | 5058 |
| Nfia | GTTTGCTTAAGCACATCCTG | 5059 |
| Nfib | GTTTGAGCATTTCCCTAATG | 5060 |
| Nfib | GCTCCATGTCGCCCTAGCTT | 5061 |
| Nfib | GAAATAACCTCTCCCTGGGC | 5062 |
| Nfib | GAACTTGATTCCCGGGACCC | 5063 |
| Nfib | GGGTGCCAGGATTTCGCTGG | 5064 |
| Nfib | GTTAAAGCTGGTATTATCAG | 5065 |
| Nfib | GAACGCGCGTTTGCAGGAGG | 5066 |
| Nfib | GAAGCAATAACAGTGTGGTG | 5067 |
| Nfib | GAGAAAGCAGAGGTCTCAGG | 5068 |
| Nfib | GAGAGAGTGCCCGCGCGAAA | 5069 |
| Nfic | GGGCGCGCATCCAATCTGAC | 5070 |
| Nfic | GTGCTGTCCCTAATATAGGG | 5071 |
| Nfic | GACTTGTGAGTGGACACTGG | 5072 |
| Nfic | GTCACTCACAGGCATCTCCT | 5073 |
| Nfic | GTTGGCTCGGTAGTGACACC | 5074 |
| Nfic | GCTGCTGCAGGGACTCAGGT | 5075 |
| Nfic | GAGCTATCCATTTGTAGAGG | 5076 |
| Nfic | GGTGGTTTGGTCAGTATCCG | 5077 |
| Nfic | GACATGGGATGTGAGGGCTG | 5078 |
| Nfic | GTCACTAACCCAGCAGGGTT | 5079 |
| Nfil3 | GAAATGGGAGACAGAGCATC | 5080 |
| Nfil3 | GTGCGTCACTGTCAGGAATA | 5081 |
| Nfil3 | GATCCCTAAGTAGGTAGAAT | 5082 |
| Nfil3 | GAAATGTCCCGCTCCTCTCC | 5083 |
| Nfil3 | GCGTCCGGTGTTACACCCTG | 5084 |
| Nfil3 | GAACTTGCCTGACTCACCCA | 5085 |
| Nfil3 | GAGGATAAATCTCCTTTCAC | 5086 |
| Nfil3 | GGTGGCAAGGTCCTTGAGCT | 5087 |
| Nfil3 | GTTTCCCGGAGAGLCACAGA | 5088 |
| Nfix | GGGAGGAATAGAGCAAATGA | 5089 |
| Nfix | GCCATTGAACAGAAAGGCCA | 5090 |
| Nfix | GGGAAAGTCCACACAAGTTG | 5091 |
| Nfix | GGCCATGTTTGCAATTGTTT | 5092 |
| Nfix | GGCGCTGCCTTCCCGTATAT | 5093 |
| Nfix | GTGCTGCCCGTTTAGGGTAT | 5094 |
| Nfix | GCGTCCATGCTCATAAACCA | 5095 |
| Nfix | GTCCCAAACCTCTGAGATGG | 5096 |
| Nfix | GTAGGACATAGAGAACTGTT | 5097 |
| Nfix | GAAGGCAGAGGGCCTTTAGG | 5098 |
| Nfkb1 | GACTCTCTAATATACAGTGT | 5099 |
| Nfkb1 | GAAATTGTAACCTACGGGCC | 5100 |
| Nfkb1 | GATTTGTAGAAGTTTGAGTG | 5101 |
| Nfkb1 | GCCATTACTGAGGCGTTGAA | 5102 |
| Nfkb1 | GATCGCTCCATAGAGCGGAC | 5103 |
| Nfkb1 | GTCTCACTACTGAGTTCAAG | 5104 |
| Nfkb1 | GTTGATTACAGGGCTCTTTA | 5105 |
| Nfkb1 | GTTCTAACCAATGATGCCTA | 5106 |
| Nfkb1 | GAGGCTCTGGAGAACTCCCA | 5107 |
| Nfkb1 | GTTTGGTTGTTCCATGGCAG | 5108 |
| Nfkb2 | GTTTGCTCCAGGCTGCGGAG | 5109 |
| Nfkb2 | GATGTTTATTCTGTAAGTGG | 5110 |
| Nfkb2 | GAGGGACCTCCTAGCTGGGA | 5111 |
| Nfkb2 | GAGGACTTTAGATGACAGGC | 5112 |
| Nfkb2 | GGGACCTCCTAGCTGGGAAG | 5113 |
| Nfkb2 | GCTGTGCACAGGCAAGCTAA | 5114 |
| Nfkb2 | GCCTTTCAAGTCAAATAGTT | 5115 |
| Nfkb2 | GTGCGCTGTGAGTGCGTGTG | 5116 |
| Nfkb2 | GGACTTTAGATGACAGGCTG | 5117 |
| Nfkb2 | GACAGGGTGGTGTGAAACTT | 5118 |
| Nfkbib | GTTCTTTGGGTAGAAAGGAA | 5119 |
| Nfkbib | GCCGGCGGCCATATTGATAA | 5120 |
| Nfkbib | GTACAGGCCTGAGAGCACGA | 5121 |
| Nfkbib | GGAGATGCAGTGAAGGTAGG | 5122 |
| Nfkbib | GAGCTGTOACAGCCTGCTGT | 5123 |
| Nfkbib | GGCGAGACTGGACTGAAGGA | 5124 |
| Nfkbib | GCATTCAGTGGTTGTAGGCA | 5125 |
| Nfkbib | GTCGTATAAGTGAAGTGATA | 5126 |
| Nfkbib | GGAGTACCGGGCAAACTCTG | 5127 |
| Nfkbib | GGGAGACAGGATCTACCTGA | 5128 |
| Nfya | GCGGTGTCAAATCCAGGAAG | 5129 |
| Nfya | GCGCCCGCTCTCGGTAGTAA | 5130 |
| Nfya | GCCTGCGTGGTATATAATTC | 5131 |
| Nfya | GTAGCTATTCTGAAGAGGGA | 5132 |
| Nfya | GCCCTCCTCCAAGCAGGGAA | 5133 |
| Nfya | GTTGCCCTCCTTAGGGTAGG | 5134 |
| Nfya | GGGTCATCCTTCACCTGCAA | 5135 |
| Nfya | GAGAAGCAGGGTTGAAGCAG | 5136 |
| Nfya | GCTTAGAAATAGGTGGGCAG | 5137 |
| Nfya | GAGGATTGTCGAATGGGTGC | 5138 |
| Nfyb | GCTACCATTCTCCCTTGTGG | 5139 |
| Nfyb | GGTACAGGGTGGAAGTCGGC | 5140 |
| Nfyb | GAGGAGGGTGTCCTAGAATT | 5141 |
| Nfyb | GCTGTGTGCCTGAGGTGGCT | 5142 |
| Nfyb | GGAAGGCCTTAAATGCACAG | 5143 |
| Nfyb | GGTAGTAAGCCAACTTGGTA | 5144 |
| Nfyb | GTAAATCTGGCTAGTAAGAA | 5145 |
| Nfyb | GGATGAGAACGCCGGCCTCT | 5146 |
| Nfyb | GGTAAATCTGGCTAGTAAGA | 5147 |
| Nfyc | GCTGCGCACTACGCGTTGCT | 5148 |
| Myc | GGAAACAGTCATGCTGTTAC | 5149 |
| Nfyc | GTCTACAGTAATATCAGCTA | 5150 |
| Nfyc | GGGTTGTGCATTGAGGCAAC | 5151 |
| Nfyc | GCAGGAAGGGCTATAGCCCA | 5152 |
| Nfyc | GTAATACATGCCTCTAATCT | 5153 |
| Nfyc | GATAGTCTGTGATGTAATCT | 5154 |
| Nfyc | GGAGCAGGAGGTCTTTCCCA | 5155 |
| Nfyc | GAAACATTCTAGGGTGCTGA | 5156 |
| Nfyc | GTAATTTCACTGCTTCTGAT | 5157 |
| Nhlh1 | GGTCCTAGTCCTCCTTATCC | 5158 |
| Nhlh1 | GACCCAGGTCCCGCAGACTT | 5159 |
| Nhlh1 | GCACAGTGAGCTACAGTATA | 5160 |
| Nhlh1 | GCAAAGATGAGGAGAGAGGA | 5161 |
| Nhlh1 | GAAGAACCTTGAGAGACCAC | 5162 |
| Nhlh1 | GTTCATCCCAACTCCCTACA | 5163 |
| Nhlh1 | GGAACGAAGGCCTGAGGAGG | 5164 |
| Nhlh1 | GTGTTAAGGCGTCATCCAAA | 5165 |
| Nhlh1 | GGGAAGACAGAGAGGTAGGG | 5166 |
| Nhlh2 | GGAGGTGGAAGATCCAAGAA | 5167 |
| Nhlh2 | GGAGTGACGATGTGGGAGAG | 5168 |
| Nhlh2 | GTCCCTGGTCACCCTCGTGT | 5169 |
| Nhlh2 | GAAGGCTGGGCATCTGTGAG | 5170 |
| Nhlh2 | GAGAGGAAGGTTTCCCAGCC | 5171 |
| Nhlh2 | GAAAGCACAGCTGCTAGGAT | 5172 |
| Nh1h2 | GGAACAGGGAGACAGGAGGT | 5173 |
| Nhlh2 | GTGTCACAGCAAGCTGATGA | 5174 |
| Nhlh2 | GGGAGCCAGGAGTGACGATG | 5175 |
| Nhlh2 | GGGATACCTGGGTTGAGCAG | 5176 |
| Nhlh2 | GAGGATGCTCAAACCATGGC | 5177 |
| Nkx1-1 | GCGGGATCAGTTGGCTGTGG | 5178 |
| Nkx1-1 | GGCGGGAGTCAAAGCCAGTG | 5179 |
| Nkxl-1 | GGGAGCAAAGACCAAGATGG | 5180 |
| Nkx1-1 | GTCAAAGCCAGTGAGGATGG | 5181 |
| Nkx1-1 | GCTCATGTCAGAATATTGAG | 5182 |
| Nkx1-1 | GAAGTGGAAGGAGGAGCAGA | 5183 |
| Nkx1-1 | GTCCCACCTGGGTCCTTCAG | 5184 |
| Nkx1-1 | GAGCCCGGCTTTGGAGGATG | 5185 |
| Nkx1-1 | GACCTGCCTGCTGATGGGTA | 5186 |
| Nkx1-1 | GTGGACTGTGCTCTGGCTCC | 5187 |
| Nkx1-2 | GTAAGAAGTAGGAAGAGGAG | 5188 |
| Nkx1-2 | GATTTGCACGCATTGTCCCT | 5189 |
| Nkx1-2 | GGATATGTGTGTGTGTGCGG | 5190 |
| Nkx1-2 | GGCTGTCCTCCCTGGAGACT | 5191 |
| Nkx1-2 | GGCAAGGCTTTAAAGTCGGC | 5192 |
| Nkx1-2 | GCCCTAAGCCTTCAGCTCTC | 5193 |
| Nkx1-2 | GGCATCACATCCCAAAGCAG | 5194 |
| Nkx1-2 | GCAATCAGGTCTGGCCTCTG | 5195 |
| Nkx1-2 | GGACAATCGCTTGAGAAGCC | 5196 |
| Nkx1-2 | GTTCTGTGTGATCGTGGCTG | 5197 |
| Nkx2-1 | GTGTGCATACACACTGTATG | 5198 |
| Nkx2-1 | GGATTAGCTAGGTTAGTGCT | 5199 |
| Nkx2-1 | GTGCATACACACTGTATGTG | 5200 |
| Nkx2-1 | GTGTCTAGGAGGCACCTGCC | 5201 |
| Nkx2-1 | GGTGGTCATAGGAACACCAA | 5202 |
| Nkx2-1 | GACTCAGTTCCACTCTGCAA | 5203 |
| Nkx2-1 | GTGTCAGTGACTTAAATAAT | 5204 |
| Nkx2-1 | GCGTTGTGTCTCTGTAGCTA | 5205 |
| Nkx2-1 | GGCAAGTGGTAGATCTGGTT | 5206 |
| Nkx2-1 | GCAGGAGGCACCAGCCATGA | 5207 |
| Nkx2-2 | GTTGGGAGGGTAGAGGGCCT | 5208 |
| Nkx2-2 | GGCCCAAGCAGCTGTGAGCT | 5209 |
| Nkx2-2 | GGTTGAATGCCATGACAACT | 5210 |
| Nkx2-2 | GTTCTGCTTCGCCTGGACTA | 5211 |
| Nkx2-2 | GGTTTCCTTAATATTGTGGA | 5212 |
| Nkx2-2 | GTCACAAGGCTCTAGAAACC | 5213 |
| Nkx2-2 | GGTGAAGACCCAGAAATCCA | 5214 |
| Nkx2-2 | GGGCGGTCTAGAGAAGGGAG | 5215 |
| Nkx2-2 | GCTCTAGCAGTGGCAGGGTT | 5216 |
| Nkx2-2 | GAGCACTGCTTGGTTGGACC | 5217 |
| Nkx2-3 | GGTTCACCCACCCAGGGTTC | 5218 |
| Nkx2-3 | GGAGAGGAGTGTTGTATCTG | 5219 |
| Nkx2-3 | GAGCCGAATTGCCTCTTCTA | 5220 |
| Nkx2-3 | GTTTCAGAAAGTTGAGGCCT | 5221 |
| Nkx2-3 | GTCTGAIGGAGACCACCTTC | 5222 |
| Nkx2-3 | GGGTGGGTGGAAGTCTCCAG | 5223 |
| Nkx2-3 | GCCTGGCCTGAGTCAGTATT | 5224 |
| Nkx2-3 | GCTGTCTGCTCCCTACCTGC | 5225 |
| Nkx2-3 | GGGTACCCAACAAGGATCCC | 5226 |
| Nkx2-3 | GGAAAGAAAGAACTGCGGGT | 5227 |
| Nkx2-4 | GTGAGCTTGATAATAGACTC | 5228 |
| Nkx2-4 | GTATGGTGCTCCTACTCTCA | 5229 |
| Nkx2-4 | GGACTTGGGACACTTGAGCT | 5230 |
| Nkx2-4 | GTGAGGAGAGGAAATGGGAA | 5231 |
| Nkx2-4 | GTGTTGTGAGGAGAGGAAAT | 5232 |
| Nkx2-4 | GCGAAGGATGGAGCTAGAAA | 5233 |
| Nkx2-4 | GAGTCCAGGTTAAACTTTGG | 5234 |
| Nkx2-4 | GCAAAGAATCTGCCTGTTGT | 5235 |
| Nkx2-5 | GTTATGCTGAGTCTAAACGC | 5236 |
| Nkx2-5 | GGGAGTCCTGTTAAGTGAAT | 5237 |
| Nkx2-5 | GTTGTGCCTTTCAGAGCACA | 5238 |
| Nkx2-5 | GGGTTCTGAGCTGAATGGAA | 5239 |
| Nkx2-5 | GATCGGGCTAGAAAGGGTCT | 5240 |
| Nkx2-5 | GCTGAGTCTAAACGCAGGGT | 5241 |
| Nkx2-5 | GCGGCTGATTGCAGGAAAGG | 5242 |
| Nkx2-5 | GATTGAAGATTGGTTTGTGT | 5243 |
| Nkx2-5 | GTTGAAAGGGACAGAGACAA | 5244 |
| Nkx2-5 | GATAGTCTCCCACTCCTGCA | 5245 |
| Nkx2-6 | GGGTTTGGAGGGCTAGTTAG | 5246 |
| Nkx2-6 | GAAGGCTCAGGGTTAGCACG | 5247 |
| Nkx2-6 | GCTTAAGAGCAAAGACCTGG | 5248 |
| Nkx2-6 | GAAAGCAGGGAGCCAGCCAG | 5249 |
| Nkx2-6 | GGGTTAGCACGTGGTTTCTG | 5250 |
| NkX2-6 | GTGCTATCTAGACCTGGGAG | 5251 |
| Nkx2-6 | GAGATCAGTGGACCACTTGA | 5252 |
| Nkx2-6 | GTACAACAGAGAGCTCCCGA | 5253 |
| Nkx2-6 | GTGGTTTCTCTGGGAACCAA | 5254 |
| Nkx2-6 | GGGAGAGTGCTGTTCAAACT | 5255 |
| Nkx2-9 | GGGCTCAGTTGGGAGGACCA | 5256 |
| Nkx2-9 | GCAATGTACAAGTCTTCCTT | 5257 |
| Nkx2-9 | GGACCCTGAGTCTGGGACTC | 5258 |
| Nkx2-9 | GTCTTGGGAGAAAGCAGGAG | 5259 |
| Nkx2-9 | GTTTGAGCAGGGAAATGACC | 5260 |
| Nkx2-9 | GGCACCGACTTGGGAGATGA | 5261 |
| Nkx2-9 | GCTGAATTCGAACCTGACAA | 5262 |
| Nkx2-9 | GAGCCAGAGGAAGACTAGAA | 5263 |
| Nkx2-9 | GCACCGACTTGGGAGATGAA | 5264 |
| Nkx2-9 | GCCAGAGGCAGAGGATGCAC | 5265 |
| Nkx3-1 | GGGAAACCAGGAAAGGTTAA | 5266 |
| Nkx3-1 | GGCATAGCCACTGCACCACT | 5267 |
| Nkx3-1 | GGAATCAGAACTGAGCAGGC | 5268 |
| Nkx3-1 | GGTTAAGGGCTCATCAGGGA | 5269 |
| Nkx3-1 | GCAGTTACTCACTGTTTGGA | 5270 |
| Nkx3-1 | GGGCTCCAGGTGACCCTCAA | 5271 |
| Nkx3-1 | GTTGTCTAGATGTGTCCAGC | 5272 |
| Nkx3-1 | GGTACAGTGCTATTTCAGTT | 5273 |
| Nkx3-2 | GCTGGAGAAGGAACAGATTG | 5274 |
| Nkx3-2 | GATGTTAATTTCAGAAGCTG | 5275 |
| Nkx3-2 | GCGAGGAATTGGAAAGCATT | 5276 |
| Nkx3-2 | GTGAGGAATGACACTCTGAT | 5277 |
| Nkx3-2 | GTGAGCTCTGGACATGCTGA | 5278 |
| Nkx3-2 | GTGTGATGGCCTGTGGACAT | 5279 |
| Nkx3-2 | GGACCCTGCAGCATCTTCAT | 5280 |
| Nkx3-2 | GCGAGGCGGACGACTTTGAC | 5281 |
| Nkx3-2 | GGAATGACACTCTGATGGGA | 5282 |
| Nkx3-2 | GTGGATTGGCTGGTTCCAAC | 5283 |
| Nkx6-1 | GCCTGCCAGTCTCTAGGCTC | 5284 |
| Nkx6-1 | GTGATAATGATCTAGGGAGT | 5285 |
| Nkx6-1 | GGTTTGAAAGCAGCAAACCC | 5286 |
| Nkx6-1 | GAGCTAATGGAGCAGGCAGG | 5287 |
| Nkx6-1 | GCCTCTAGCCAGGTGCTGTC | 5288 |
| Nkx6-1 | GTGTCACTGACTGCCCTTTC | 5289 |
| Nkx6-1 | GGGTTTAGGTAGCAGAGGGC | 5290 |
| Nkx6-1 | GGTCCAGACACCGTTGGAGG | 5291 |
| Nkx6-1 | GATCATTATCACTTATGAGG | 5292 |
| Nkx6-1 | GGGCAGTTGATACACCAGTG | 5293 |
| Nkx6-2 | GGATGAATGAAGCGGGAGTG | 5294 |
| Nkx6-2 | GAGACAGGGTAGGTGTGCTC | 5295 |
| Nkx6-2 | GCTTAGTTCAGGGAAGAGCC | 5296 |
| Nkx6-2 | GTGGGCTGTTGTGAACTTGT | 5297 |
| Nkx6-2 | GTGCCTAGTGGTCCTGTCCT | 5298 |
| Nkx6-2 | GGCGAACTATGAGACAGGGT | 5299 |
| Nkx6-2 | GTTCAGGGAAGAGCCTGGGA | 5300 |
| Nkx6-2 | GGGCGAATGGAAATTTGTTA | 5301 |
| Nkx6-2 | GCATCTCCGTAGGTGGGCTG | 5302 |
| Nkx6-2 | GGTCCTGGCGATTTAAGCAG | 5303 |
| Nkx6-3 | GAGCAATCACTATTCTCTGG | 5304 |
| Nkx6-3 | GAACAGAGCTACACAGAAAG | 5305 |
| Nkx6-3 | GGCATTCCAcTGAAGAATGG | 5306 |
| Nkx6-3 | GAGACCTAAGCAGGGCAGTC | 5307 |
| Nkx6-3 | GATGAGCCAAGAAGAAGCGA | 5308 |
| Nkx6-3 | GTCCACCAATGCCCAGATCC | 5309 |
| Nkx6-3 | GGCTCATCTTTGGGAGTTCG | 5310 |
| Nkx6-3 | GCGTCACATTCATTCCGACA | 5311 |
| Nkx6-3 | GTAGGGACTGGAGGCTCCTG | 5312 |
| Nobox | GAGAGACTTCTGACAGGAGT | 5313 |
| Nobox | GGGTCAGCACTTCTAAGAAG | 5314 |
| Nobox | GACTTCCAATAAGCTGCTGT | 5315 |
| Nobox | GTTTAGTCTCCTCCAGGCCT | 5316 |
| Nobox | GCTTCCCAAGGAAGGCCTTG | 5317 |
| Nobox | GCCTGCTTGATGGAAAGGTA | 5318 |
| Nobox | GGAGCAGAACAGCAATGGAA | 5319 |
| Nobox | GCTCATATTCAAGGGTCAAG | 5320 |
| Nobox | GCATGGTGCTCTTGCTGGTG | 5321 |
| Nov | GCTGGAGAGTCAAGTCAAGC | 5322 |
| Nov | GGTTGGAACTGTGAGGGCGG | 5323 |
| Nov | GGAGCCATATGAGCTGGGCA | 5324 |
| Nov | GGAGGCGTCCATCAGGTTAG | 5325 |
| Nov | GCTGATTCTTGACCCTCTCC | 5326 |
| Nov | GCAAAGTTTAGGCAGAGGTA | 5327 |
| Nov | GTGCCATCTTGGAGTATTAG | 5328 |
| Nov | GACTAAGCTTTGCCTAAAGG | 5329 |
| Nov | GGGAAGAAAGGTGTAATTTA | 5330 |
| Npas1 | GCTGGCAGAGCTTCCTGATG | 5331 |
| Npas1 | GAGGCATAGAGACAAGACCT | 5332 |
| Npas1 | GTGAGGATGCICCTACACTC | 5333 |
| Npas1 | GGCATCCTGGAATTCTCACT | 5334 |
| Npas1 | GTTACAGAACCTTCCAACAT | 5335 |
| Npas1 | GCGATCGTGGTGGGACTCCA | 5336 |
| Npas1 | GTGTGCTCACACGCATTCCA | 5337 |
| Npas1 | GGGAACTATCCAGCAGGCAG | 5338 |
| Npas1 | GTGACAGTTAAAGCTGCGCA | 5339 |
| Npas2 | GTGTTTCTTCTCACCCAGGA | 5340 |
| Npas2 | GAGGTGAGTCCTGCGCACTC | 5341 |
| Npas2 | GATCTCTGGACGCCAGTAGA | 5342 |
| Npas2 | GGCAGGGTTTGTAGGATGCT | 5343 |
| Npas2 | GTCCTGGCTCATGGTGTTCT | 5344 |
| Npas2 | GGCTAGACCAGCCGGAAGAG | 5345 |
| Npas2 | GGTGCAGGTCCAGTTTGCAC | 5346 |
| Npas2 | GATAGGTAGCCAGGAGCCAA | 5347 |
| Npas2 | GTCAGAAACAAGCCTGAGGA | 5348 |
| Npas2 | GTGAGAGTGAACGCTGTTCG | 5349 |
| Npas3 | GAGCATTTCTACCTGGGTTA | 5350 |
| Npas3 | ACAGTCACAGGGAGACTGGG | 5351 |
| Npas3 | GAAAGATTGCATGGCACTAC | 5352 |
| Npas3 | GGAGAACTTGATAGTTATCT | 5353 |
| Npas3 | GTGAGCGGAAGAGTTGGTCT | 5354 |
| Npas3 | GGGTTTCACTGAGCTAGGGT | 5355 |
| Npas3 | GCCTGCACAGAGCAAAGGGC | 5356 |
| Npas3 | GACGCCTGCCTTTCATTAGG | 5357 |
| Npas3 | GTTTCCAGAATCATCAGGGT | 5358 |
| Npas3 | GAAATAACCACCATCCGGGC | 5359 |
| Nr0b1 | GATGCTGGATCGAGGAGCTG | 5360 |
| Nr0b1 | GTTACTATCCTATGATGGTT | 5361 |
| Nr0b1 | GAGGTCAGAGTCTAAGTTAA | 5362 |
| Nr0b1 | GACCTTAAGGTGCAGGACTT | 5363 |
| Nr0b1 | GGGACACTATCAGGAATAAA | 5364 |
| Nr0b1 | GAACACTGAGCCAATGGGTA | 5365 |
| Nr0b1 | GGTGACGAAGGCCAGCAATT | 5366 |
| Nr0b1 | GGAACACTGAGCCAATGGGT | 5367 |
| Nr0b1 | GTGGAGTGAAGAAGGAAAGG | 5368 |
| Nr0b1 | GGATGCTGGATCGAGGAGCT | 5369 |
| Nr0b2 | GAGACAAATGTCCAGGACAG | 5370 |
| Nr0b2 | GAGAGAACAAACAGAGCTCA | 5371 |
| Nr0b2 | GCGATAAGCCACTTCCAGGC | 5372 |
| Nr0b2 | GTTCTACCCATACTGTAGGT | 5373 |
| Nr0b2 | GAACCCTGGTCTTATGTGCA | 5374 |
| Nr0b2 | GTCTCTAGIGGTCAGAGGTA | 5375 |
| Nr0b2 | GGTTCTACCCATACTGTAGG | 5376 |
| Nr0b2 | GTGACTGCTCCTTTCCATCA | 5377 |
| Nr0b2 | GTATGGCCCACCTACAGTAT | 5378 |
| Nr0b2 | GAGACTGTAAGGTCTTCCTG | 5379 |
| Nr1d1 | GGGTAGGACTGGCATAGCAC | 5380 |
| Nr1d1 | GCAAGGGCATGTGAATTCCT | 5381 |
| Nr1d1 | GGGAGGAGCTAAGACAAACA | 5382 |
| Nr1d1 | GAGGTAGTACTGGGACTAGG | 5383 |
| Nr1d1 | GTGAGAAACACAGAGGCCTG | 5384 |
| Nr1d1 | GTTGGCTGGGAGGAGGGAGA | 5385 |
| Nr1d1 | GCTCCTCCCAGTTCCTCCCA | 5386 |
| Nr1d1 | GATCTCAACGTGCCGGCTGC | 5367 |
| Nr1d1 | GCTGGGAGGAAGGGAAGGAG | 5388 |
| Nr1d1 | GGCAAGGGCATGTGAATTCC | 5389 |
| Nr1d2 | GCTCAGAGTCCTGGAAAGCT | 5390 |
| Nr1d2 | GCAGTAACCATGTGGGACCA | 5391 |
| Nr1d2 | GGAGCCTGTATAGAGGAAGT | 5392 |
| Nr1d2 | GAGGTCAGGACCGCTCGTTG | 5393 |
| Nr1d2 | GGGATAAGCGGCTGCGAGAC | 5394 |
| Nr1d2 | GGTCCACGGATTGGAAGAAG | 5395 |
| Nr1d2 | GCGAGACAGGCTGGGAAGGA | 5396 |
| Nr1d2 | GAGCAAACAACCTCTAGCAG | 5397 |
| Nr1d2 | GTCACCTCCATGGTCCCACA | 5398 |
| Nr1h2 | GATTCCCAACTGTCCATAAG | 5399 |
| Nr1h2 | GCTGCGAGGAAAGTGAGGGA | 5400 |
| Nr1h2 | GACAGACTTCCGGTCTGCCA | 5401 |
| Nr1h2 | GGAGATGGCAAGATGGTTAC | 5402 |
| Nr1h2 | GAGGTTATCTGAGGTTGGAC | 5403 |
| Nr1h2 | GAGATGCTGGCCCTGGAAGC | 5404 |
| Nr1h2 | GCGTCACTTCCGGAAGTAGG | 5405 |
| Nr1h2 | GAGAGCTGCGAGGAAAGTGA | 5406 |
| Nr1h2 | GGAAGTAACTTCAGAAGCCT | 5407 |
| Nr1h3 | GAGGGAGCGCCAAGAGTAAA | 5408 |
| Nr1h3 | GGGTGAAGACAGGCAGGTGC | 5409 |
| Nr1h3 | GGGAAGGGTGAACATGGTTG | 5410 |
| Nr1h3 | GAGCCTGTGAGCAGGAAACT | 5411 |
| Nr1h3 | GACTGGGAACACGTGCAAGA | 5412 |
| Nr1h3 | GAGGCTGCTGGGATTAGGGT | 5413 |
| Nr1h3 | GAAGAGATTAGGGAGTCAGG | 5414 |
| Nr1h3 | GAGGCAGAAGCTGAAGATGG | 5415 |
| Nr1h3 | GACAGTGCTGCCTCTTCTAC | 5416 |
| Nr1h3 | GAGGTGTCTTTGGGAGGAGG | 5417 |
| Nr1h4 | GGAGGAGAAAGAAATGTATT | 5418 |
| Nr1h4 | GGGATTCTCCAAACTGCTTC | 5419 |
| Nr1h4 | GATACATGTAGAGGAGCTGA | 5420 |
| Nr1h4 | GGATGTCAGCAAATTATGGC | 5421 |
| Nr1h4 | GGAATAATTCCAACCATCAC | 5422 |
| Nr1h4 | GGATCTTTACCTTTGTAACT | 5423 |
| Nr1h4 | GCTGGAGGTTAAATGCCACA | 5424 |
| Nr1h4 | GATCAAGGTGTTTACAAAGG | 5425 |
| Nr1h4 | GTTCTTAGGAGATTAGAGGG | 5426 |
| Nr1h5 | GTCCCAGCACCTATGTTAAT | 5427 |
| Nr1h5 | GATCATTGCTGGCAAGGCAA | 5428 |
| Nr1h5 | GAACTCCTCACTTACCCTTA | 5429 |
| Nr1h5 | GATCTTGCTGCTGCGTGTCT | 5430 |
| Nr1h5 | GAGAGCTGTACAGAAAGAAC | 5431 |
| Nr1h5 | GAGCTGTACAGAAAGAACAG | 5432 |
| Nr1h5 | GCACTGCTCTGCAGAGTGTC | 5433 |
| Nr1h5 | GATGAAATCAAACGGACAGG | 5434 |
| Nr1h5 | GTCACATCTTCTCTGACGGA | 5435 |
| Nr1i2 | GGAGGAAATAGCTTCGAGAC | 5436 |
| Nr1i2 | GAAGAGCATTTCTCTCCTTT | 5437 |
| Nr1i2 | GAGTCACTCCCACGCATGGC | 5438 |
| Nr1i2 | GGACAAGACGGGCTCCATTG | 5439 |
| Nr1i2 | GGGACACTTATTTCCACGAG | 5440 |
| Nr1i2 | GAGTGACTCAGGTCCTCTCT | 5441 |
| Nr1i2 | GCCAGAGAACCAGAGAGAAT | 5442 |
| Nr1i2 | GGGAAATTGAACAAACCAGA | 5443 |
| Nr1i2 | GCTAGCTCGGGTGCTGGACT | 5444 |
| Nr1i2 | GGAGTGACTCAGGTCCTCTC | 5445 |
| Nr1i3 | GTGTTGGTTGGTGGCAGATG | 5446 |
| Nr1i3 | GTGCCTGCTGAGGTCAGAAG | 5447 |
| Nr1i3 | GTAGCATTGGGCAAGCTATG | 5448 |
| Nr1i3 | GTATCAGGGTTGGAGCCTGG | 5449 |
| Nr1i3 | GACCTCAGCAGGCACAAATA | 5450 |
| Nr1i3 | GCATGGATCCTGAATAAGCC | 5451 |
| Nr1i3 | GGATCCCACTTTCTTACGTG | 5452 |
| Nr1i3 | GCCACCAACCAACACTTCTC | 5453 |
| Nr1i3 | GGGATCCCACTTTCTTACGT | 5454 |
| Nr2c1 | GCAGGAACTGTTAACTATCT | 5455 |
| Nr2c1 | GGAGTCTGTGTAGGATAACA | 5456 |
| Nr2r1 | GACACCAGAGTTGCAGGTAT | 5457 |
| Nr2c1 | GTACCCTTCTCCCTCGAATC | 5458 |
| Nr2c1 | GCCAGTGAGGTTCATCTAAA | 5459 |
| Nr2c1 | GCAGAATCCTGAGCCGGAGG | 5460 |
| Nr2c1 | GTGCCCAAGACGGCAGAGAA | 5461 |
| Nr2c1 | GACTTAAGTCCATGAACTGG | 5462 |
| Nr2c1 | GAAACTCTGACTCAGCCTCA | 5463 |
| Nr2c1 | GCTGGAGAGAGCAGAGGCGA | 5464 |
| Nr2c2 | GGATATCACCTTACTTTGGA | 5465 |
| Nr2c2 | GGACACCTCAGGAGAGTTTA | 5466 |
| Nr2c2 | GTTCACCGGTGAAGTTAGCC | 5467 |
| Nr2c2 | GGCCGTGGCCCTCCTATAAG | 5468 |
| Nr2c2 | GGCGGGCTTGCTCTTACCTC | 5469 |
| Nr2c2 | GCTGCTCTTACCCTCAGGGT | 5470 |
| Nr2c2 | GCATGTTACTGAGCTCTCCC | 5471 |
| Nr2c2 | GAGCTCCCGGTACCTTCCTT | 5472 |
| Nr2c2 | GAAAGCTACCATCCATCCCA | 5473 |
| Nr2r2 | GGTACCTTCCTTGGGATGGA | 5474 |
| Nr2e1 | GTGGGAAAGAAAGAAGTCCT | 5475 |
| Nr2e1 | GACGAGTTGAGAGTGAATAC | 5476 |
| Nr2el | GTACACGCAATGGAGGCGAG | 5477 |
| Nr2e1 | GGGAGGAGATGGGAAGAGGG | 5478 |
| Nr2e1 | GTTCTCTCGGTGTGGAGTGG | 5479 |
| Nr2e1 | GAGTCAGCAGGCACTGCAGG | 5480 |
| Nr2e1 | GACCCGGTCCTTGGATCTGC | 5481 |
| Nr2e1 | GGTCTGACGTCAGCCATGTG | 5482 |
| Nr2e1 | GTTTGAGCTGTGCCGCGAGC | 5483 |
| Nr2e1 | GCAAAGATGTGGGCAAGTGG | 5484 |
| Nr2e3 | GAGGACACTGAGGGTCTTGA | 5485 |
| Nr2e3 | GCAGAGGGTATTGGGCAGGC | 5486 |
| Nr2e3 | GAGGGTCTTGAAGGATGGTC | 5487 |
| Nr2e3 | GCCTGCCCAATACCCTCTGC | 5488 |
| Nr2e3 | GCAGCCAAGTCAGGGCTTCA | 5489 |
| Nr2e3 | GCCGAGATGAGGCAGGACCT | 5490 |
| Nr2e3 | GAGGGTTAAGCCCACTTAGG | 5491 |
| Nr2e3 | GAGGAAGAGAGACTAGGGTA | 5492 |
| Nr2e3 | GTCGAGAGCCACCAGGTTAG | 5493 |
| Nr2e3 | GCAAACAAGTAGAGTGGGTA | 5494 |
| Nr2f1 | GGAGCCAAGAGAAGGGCTGC | 5495 |
| Nr2f1 | GTTTGGAGTTTGAGCATCCT | 5496 |
| Nr2f1 | GGAGGAGAAGAGAAAGTGAG | 5497 |
| Nr2f1 | GTAACTCCTCATATTGTTGT | 5498 |
| Nr2f1 | GTACGCAGATGATGGAGAGG | 5499 |
| Nr2f1 | GATGATGGAGAGGCGGGACA | 5500 |
| Nr2f1 | GTGTCAAGGAGCCAAGAGAA | 5501 |
| Nr2f1 | GCGCTGCCTTCCTGAATGGC | 5502 |
| Nr2f1 | GAAATGGCACAGGCGGCAGC | 5503 |
| Nr2f2 | GTCTCATCAGTTACAAAGAG | 5504 |
| Nr2f2 | GATGAGTTGCCAGGTCTAAT | 5505 |
| Nr2f2 | GACAGAGTGTGAGACAAGGA | 5506 |
| Nr2f2 | GATGCAGAGTAGGACACTGC | 5507 |
| Nr2f2 | GCCATCGAAATCAGGAGGAC | 5508 |
| Nr2f2 | GTATTATTGCCATTTGGAGC | 5509 |
| Nr2f2 | GCTCTGGTCTTTGTCTTAGA | 5510 |
| Nr2f2 | GGCTTCAAGACAGAAGTAGG | 5511 |
| Nr2f2 | GAATTCTCACAATCAACTAG | 5512 |
| Nr2f2 | GTGGGTTCTACATAATGCGC | 5513 |
| Nr2f6 | GGTTGGGTCCCAAAGGTTAG | 5514 |
| Nr2f6 | GACATTTGACCTTGTGGTTG | 5515 |
| Nr2f6 | GCTTGCTCCAGTAGAATTGG | 5516 |
| Nr2f6 | GCTTGCCTGAATTCGATTCT | 5517 |
| Nr2f6 | GTATCCAGGTGGATTCTTCT | 5518 |
| Nr2f6 | GATTCTGGGCACTGCATGAT | 5519 |
| Nr2f6 | GAAGAAAGGCTCTGGAAGAG | 5520 |
| Nr2f6 | GGCCAGAGAGAGGGCTTAGG | 5521 |
| Nr3c1 | GTCACTGCTCTTTACCAAGA | 5522 |
| Nr3c1 | GACTCTTCTGCTCAGTTTGC | 5523 |
| Nr3c1 | GGTGTTATGGTGTTGCTTTG | 5524 |
| Nr3c1 | GTCCCTGGAACTCAGAAAGA | 5525 |
| Nr3c1 | GTGATTAAGGAAGCCTTGCG | 5526 |
| Nr3c1 | GCTCTTCATAACTCCTCTCC | 5527 |
| Nr3c1 | GATCCCATAATTTACATGAA | 5528 |
| Nr3c1 | GAGGAAGGTGGAGAGAGGGC | 5529 |
| Nr3c1 | GTGTTGTTATGGTTTCAGGC | 5530 |
| Nr4a1 | GCCACCTAGGAGAAGAAGTG | 5531 |
| Nr4a1 | GCTAACGTGTAGTCTCGTTG | 5532 |
| Nr4a1 | GACCTTACCCTAGGGTACAC | 5533 |
| Nr4a1 | GGGTTCATGCTCCACATTGG | 5534 |
| Nr4a1 | GGCCTGCAAGGATGAAGTGT | 5535 |
| Nr4a1 | GAGAGGGAGCTGTTGGCACC | 5536 |
| Nr4a1 | GTGGCITCCATATTTAAACA | 5537 |
| Nr4a1 | GAGTCCTGGGCTAGTGTTGT | 5538 |
| Nr4a1 | GCAGCAGAAATCGGGAACCA | 5539 |
| Nr4a1 | GTGCAGGTCCTGTCTTCACC | 5540 |
| Nr4a2 | GACTGTCTGAAGATAGCTGC | 5541 |
| Nr4a2 | GTTCCAGGAGAGCGGGTATC | 5542 |
| Nr4a2 | GGCCACAAAGATGTAAAGAA | 5543 |
| Nr4a2 | GAGCCAAATGCCTCAGGCAT | 5544 |
| Nr4a2 | GTCAAGGCTGCCATCTAAAG | 5545 |
| Nr4a2 | GTGTGAGGACGCAAGGTCTG | 5546 |
| Nr4a2 | GACCTCTCATCCTTCGAAGC | 5547 |
| Nr4a2 | GTCCTTTCTTTACATCTTTG | 5548 |
| Nr4a2 | GTTCCTATGCCTGAGGCATT | 5549 |
| Nr4a2 | GTGAAAGGGACTGAAGGGCT | 5550 |
| Nr4a3 | GCAGGCGATGTTTCTAAATT | 5551 |
| Nr4a3 | GATTGAAGGAGGATCTTCTC | 5552 |
| Nr4a3 | GTTCGACCCTGTCTGATGCC | 5553 |
| Nr4a3 | GGCGATGTTTCTAAATTGGG | 5554 |
| Nr4a3 | GATTAGCAGCCTGCACAAAC | 5555 |
| Nr4a3 | GAGGCTGAGAGTGTAGGAGG | 5556 |
| Nr4a3 | GATAATGCCACTTATGTGTG | 5557 |
| Nr4a3 | GGAGACATGACATCTTTCCA | 5558 |
| Nr4a3 | GCGCAAGATACCCTCCAGGT | 5559 |
| Nr4a3 | GGTGCTTCACTTCTTCTTGG | 5560 |
| Nr5a1 | GATATGGTCCATTGGTAGCT | 5561 |
| Nr5a1 | GCTTGTCCCAGATCTGAGTG | 5562 |
| Nr5a1 | GTTGGTGTTTCTCTTCATTT | 5563 |
| Nr5a1 | GGCAGCGGCTTGTTAGCGAC | 5564 |
| Nr5a1 | GAGGCTGGCCATTAGAGGCC | 5565 |
| Nr5a1 | GGGCATGAGTCCACAAAGTA | 5566 |
| Nr5a1 | GCCCTTCATCCATCTACCCA | 5567 |
| Nr5a1 | GGTGTGGCTICAGGGACTTC | 5568 |
| Nr5a1 | GTTCCTCAACACTCTGGCTT | 5569 |
| Nr5a1 | GGCACCTAAACCTCAGGGAT | 5570 |
| Nr5a2 | GGTATCGGTGGTCCTAGCCT | 5571 |
| Nr5a2 | GCTAAGACTTCTTCTGTGTG | 5572 |
| Nr5a2 | GAAGAAAGCTCACTGATAGG | 5573 |
| Nr5a2 | GTATCGGTGGTCCTAGCCTA | 5574 |
| Nr5a2 | GTAGTGACAGCCCTGAGCAT | 5575 |
| Nr5a2 | GTGAGCTGTAAAGAGAACCT | 5576 |
| Nr5a2 | GCTCCTTAGTTTGAGGAAGA | 5577 |
| Nr5a2 | GAGTCACTGAGTTCAGAAGA | 5578 |
| Nr5a2 | GGGATGATCTTAAGCTGGGA | 5579 |
| Nr5a2 | GTCCTCTTATCAACCGGCAC | 5580 |
| Nr6a1 | GATGACGGTCGGCCGTAGTT | 5581 |
| Nr6a1 | GAATCAGGAAGGCTGTAGCA | 5582 |
| Nr6a1 | GAAATGTAGTCCTCCCAACG | 5583 |
| Nr6a1 | GGAAGACAGAAGAAATGGAA | 5584 |
| Nr6a1 | GATAGCGTGTATGTGAGAGT | 5585 |
| Nr6a1 | GAAGAGGCATGGGAGCAACG | 5586 |
| Nr6a1 | GCTTCGATACGGCCCATTAG | 5587 |
| Nr6a1 | GGTCCCTCTGTATTCCCAGA | 5588 |
| Nr6al | GCTCTCACATACAAATGAAG | 5589 |
| Nr6a1 | GGCCTGTTTGCCTCTCTACA | 5590 |
| Nrf1 | GGAGCTAATGCAGAIGTCGC | 5591 |
| Nrf1 | GTTTGGAGAGATGAAATGAA | 5592 |
| Nrf1 | GTTGTGTTATTTCCCTGTTT | 5593 |
| Nrf1 | GTTTGCTAACAGGTGCAcTT | 5594 |
| Nrf1 | GTTAATGCTGTCTGACACTA | 5595 |
| Nrf1 | GCAATGCCCAGAACCCAGGC | 5596 |
| Nrf1 | GTCTTACACAATCTAGGCGC | 5597 |
| Nrf1 | GATTCAGTGTGCACTCTCCA | 5598 |
| Nrf1 | GGTTACTACTATCCAGTCTT | 5599 |
| Nrl | GCACCTATTTAAACAGCTTC | 5600 |
| Nrl | GTATGATTCTCAGGGACCAG | 5601 |
| Nrl | GTCGGAGTATCTTTGTGCCT | 5602 |
| Nrl | GGCAGGTTTAAACATCTCCT | 5603 |
| Nrl | GGGATAGTAGGACTTAGCCA | 5604 |
| Nrl | GACGAGTCAGGGTGAAGGTA | 5605 |
| Nrl | GCCTCATCCAATAAGATGAA | 5606 |
| Nrl | GCGTATATGTCTCCTTGACA | 5607 |
| Nrl | GTCAGGGTGAAGGTAGGGCA | 5608 |
| Nrl | GGCTGAGAATTGTGTTTCCA | 5609 |
| Ntrk1 | GCCTGCCTCTTATCAGTCAG | 5610 |
| Ntrk1 | GGTTTAAACTCAGACTTTAC | 5611 |
| Ntrk1 | GGGACATTAGGAAGGCGAGC | 5612 |
| Ntrk1 | GGTGTTCTGGAGGGAGATGG | 5613 |
| Ntrk1 | GCCACTTCACACTGGAACCT | 5614 |
| Ntrk1 | GGCGGAGAGAACAGAGAAGT | 5615 |
| Ntrk1 | GCTGTCCTTGGGATCTGGCC | 5616 |
| Ntrk1 | GTATCCTCCAGGGAGAAAGG | 5617 |
| Ntrk1 | GGATACCTGGAAGACAACCA | 5618 |
| Ntrk1 | GCGCAAGACTTGCCATTTAG | 5619 |
| Numb | GGGACTCGACCACTAAGTTT | 5620 |
| Numb | GGGCGGTAAAGAGAGGATGA | 5621 |
| Numb | GGGCGGTAAAGAGAGGATGA | 5621 |
| Numb | GCTATTGTTTCCGATCTGCT | 5623 |
| Numb | GGTAATCCTCCTTTGTCAGT | 5624 |
| Numb | GAGTCAACCAATCGCAGCAG | 5625 |
| Numb | GGTTCCAGAAGATAACTAGG | 5626 |
| Numb | GCACACTTAGAACTAACCAA | 5627 |
| Numb | GATTTCTAAGAGGCCCTGTG | 5628 |
| Numb | GCTTGGAAGTGGTAGTGGTG | 5629 |
| Obox3 | GCTTCAGGAAGGGCCATATT | 5630 |
| Obox5 | GGGTGGAGCCAACGTGAAGG | 5631 |
| Obox6 | GCAGACTGAGCGGAGCTTCT | 5632 |
| Obox6 | GGCTGAATGGTGTTACAGCC | 5633 |
| Obox6 | GGAGAGCTTGCTGATGAATA | 5634 |
| Obox6 | GCTGATGAATAGGGTGAATT | 5635 |
| Obox6 | GGGAGAGCTTGCTGATGAAT | 5636 |
| Obox6 | GTGGAAGAGCCCTGCATTGG | 5637 |
| Obox6 | GTGGCACCAAAGGGTGGGTG | 5638 |
| Obox6 | GAGGCTTGTATGTATAAGGC | 5639 |
| Obox6 | GATGGTTTCCTAAGTGTGAA | 5640 |
| Olig1 | GGAGAGAGCTGAAGGGATAA | 5641 |
| Olig1 | GGTCAGGTAGACACACACAT | 5642 |
| Olig1 | GGAGCCCACTTGGGAACAGA | 5643 |
| Olig1 | GTCCTCCTCCCACGGCAGAA | 5644 |
| Olig1 | GAGCACAATGGGATTCCTTG | 5645 |
| Olig1 | GGAAGCTTGGCCAGGAAGAG | 5646 |
| Olig1 | GGGCAAGGGAGGGAGCTTTA | 5647 |
| Olig1 | GTGAGCTCAGATAAAGGCGG | 5648 |
| Olig1 | GTTGCCAGAGAGGGTTATCG | 5649 |
| Olig1 | GTAGAGACAAACAGGTGCTC | 5650 |
| Olig2 | GTCCACCCTCGAGTGTCAGT | 5651 |
| Olig2 | GTTCACTTGCCTAGGCTAAT | 5652 |
| Olig2 | GGATCTGGGTGAATTGCCTG | 5653 |
| Olig2 | GCTTGCTGAAATCAATTCCT | 5654 |
| Olig2 | GATGTTGGAAGTTCAGTGGC | 5655 |
| Olig2 | GACAGATTCTGCTAATTGAA | 5656 |
| Olig2 | GTCACTGTAGCGTCAGGCCA | 5657 |
| Olig2 | GTGACCCTGCCTACCGTGGA | 5698 |
| Olig2 | GGCATGGCCTTGGAGAGCAC | 5699 |
| Olig2 | GTGGTCCTCACTCTCTAAGT | 5660 |
| Onecut1 | GCTTTCTCAGCGGCGCCGAA | 5661 |
| Onecut1 | GAGGATCATGGATGGCAGTT | 5662 |
| Onecut1 | GGAACTAGCAACTCAGACTC | 5663 |
| Onecut1 | GAACTAGCAACTCAGACTCA | 5664 |
| Onecut1 | GCCCGGGTTCAATTCCGGAT | 5665 |
| Onecut1 | GACCAAGCTGGCTTGAAGTA | 5666 |
| Onecut1 | GGTGTGGTCAACCCAGGGTG | 5667 |
| Onecut1 | GAGTCTGAGTTGCTAGTTCC | 5668 |
| Onecut1 | GCACATCTGTCCTTTCTCCA | 5669 |
| Onecut1 | GATTTCAGGTTACCACACCC | 5670 |
| Onecut2 | GGCGCCGACGTCTTCTGTTT | 5671 |
| Onecut2 | GCCCTACAAACTTCTCCTGG | 5672 |
| Onecut2 | GGAGATTTCCGCGAACTGTG | 5673 |
| Onecut2 | GTCTTCTTGGGACTAGAGAA | 5674 |
| Onecut2 | GTGGCTGAAGACAGCCAGAG | 5675 |
| Onecut2 | GCTCCTAGAACCAAGCATCA | 5676 |
| Onecut2 | GAAGACACATACAGTATTGT | 5677 |
| Onecut2 | GCTGCCAATGGCTATAGAAG | 5678 |
| Onecut2 | GTGAGCGGGAGCTGTCCAGA | 5679 |
| Onecut2 | GGGAAGAAGGGAGGAGAAGG | 5680 |
| Osr1 | GAGTTCTGTTCTGGAGCTTT | 5681 |
| Osr1 | GTTTCCCAATGCGCAGGCGC | 5682 |
| Osr1 | GTTACTAAGGGATTGCTTCT | 5683 |
| Osr1 | GCACAGTAAAGCTGAGGAGT | 5684 |
| Osr1 | GGAGCTTTAGAATGGAATTC | 5685 |
| Osr1 | GAAACTAGTGGATGGAGGGC | 5686 |
| Osr1 | GTATGCCTAAGGTGCTGGTG | 5687 |
| Osr1 | GGAGTTTCCTCTTCTTCACT | 5688 |
| Osr1 | GGGACTGAGGTCACCTCAGT | 5689 |
| Osr1 | GCTTGCTTCCAGATGCATCC | 5690 |
| Osr2 | GTCACCTTGGGCTCTGTGTC | 5691 |
| Osr2 | GGTCTGTCTACCTGGTGAGC | 5692 |
| Osr2 | GAGAACGCCTAGGAAGAGTT | 5693 |
| Osr2 | GGACTTCTCTGCGGGCTTGG | 5694 |
| Osr2 | GAGCTGTCCCAGCTCCCTGT | 5695 |
| Osr2 | GACACGGAGCTGAGGGTGGA | 5696 |
| Osr2 | GGTCTTGAGCCTCAGCTCCC | 5697 |
| Osr2 | GGACACCACGGCTCGTTTGG | 5698 |
| Osr2 | GGCAGGTTATTGTTTGCCAA | 5699 |
| Otp | GCAGAGCGAGAACAGGGAGT | 5700 |
| Otp | GTTTGGGAGCAGATCAGAAA | 5701 |
| Otp | GGCTCAGTAGGCCAGAGTCT | 5702 |
| Otp | GGGAAATCTGAGAATGGGAG | 5703 |
| Otp | GGGCTCAGTAGGCCAGAGTC | 5704 |
| Otp | GAAGAGCAAGGAGACAAAGG | 5705 |
| Otp | GGTGGGATGTGTGTGGGCTG | 5706 |
| Otp | GGAAATCTGAGAATGGGAGG | 5707 |
| Otp | GTGCTTGTGCTCTGAAGTCT | 5708 |
| Otp | GAGCAAGGAGACAAAGGAGG | 5709 |
| Otx1 | GTTTATTCGGCTGGAAACTG | 5710 |
| Otx1 | GAGGATGGAGGAGTTTGTGG | 5711 |
| Otxl | GGTGAGAACGGCAGAAGATG | 5712 |
| Otx1 | GGCACTCCTTGATGCTCCCT | 5713 |
| Otx1 | GAGCGGAGGAGGAGTTGCTG | 5714 |
| Otx1 | GACAAAGGATCAGGGCCGCC | 5715 |
| Otx1 | GGCATCTCCTACTGAATACT | 5716 |
| Otx1 | GAACGAGTTGAGGAGGGCGA | 5717 |
| Otx1 | GAGGAGTGGCGTCAAGCTGC | 5718 |
| Otx1 | GCTAGGBAAAGGTACGGGTC | 5719 |
| Otx2 | GAGCCGGAGGGAAAGGAAGA | 5720 |
| Otx2 | GCCTGTATTAACATCGATGG | 5721 |
| Oxt2 | GCAAAGAATGTGTGGGTCAG | 5722 |
| Oxt2 | GCCCTAGCGGCTTTGAGAAG | 5723 |
| Oxt2 | GAAAGGAAGAAGGAGGTACG | 5724 |
| Otx2 | GGACAGCCAGACCTGAGGGT | 5725 |
| Oxt2 | GCTAATTGCTGTAAATCCCA | 5726 |
| Oxt2 | GAGCGTGCATTTGGAGGCGT | 5727 |
| Oxt2 | GTCCCTAAGGCCTTTCATTT | 5728 |
| Ovol1 | GGGATGGAACCTGCAGTTAA | 5729 |
| Oval1 | GGAATGGAAACCGGTTCGAC | 5730 |
| Ovol1 | GAATTGCTCACCCTGGCCTT | 5731 |
| Ovol1 | GAGAGGTATTTGCTGGGCAC | 5732 |
| Ovol1 | GCCTGGGTTAGGTTGGACTC | 5733 |
| Ovol1 | GGTGCTGGCCTGGGTTAGGT | 5734 |
| Ovol1 | GTCCAAATCAGAGTGAAAGG | 5735 |
| Ovol1 | GACGATTCATCCCATGAACA | 5736 |
| Ovol1 | GAAGTGTGGGCTATGACAGA | 5737 |
| Ovol2 | GGAGGGAAGTGTGTGTGTGT | 5738 |
| Ovol2 | GCGAGAGGAAACTTGGCGCG | 5739 |
| Ovol2 | GTGCAGGAAGAGGGCAGGCT | 5740 |
| Ovol2 | GGCCAAAGTGGCCTGGAAGT | 5741 |
| Ovol2 | GTTGACACCGTTATGTTGCA | 5742 |
| Ovol2 | GGGTTCCTACAACGATAGCT | 5743 |
| Ovol2 | GGAATCTCGGTGGTCGGATG | 5744 |
| Ovol2 | GGGCTAAATTGCCTGGCGGC | 5745 |
| Ovol2 | GACCTTCAGGAGCGGTTTAG | 5746 |
| Ovol2 | GGGATCCTCTCTTCCGACTG | 5747 |
| Parp1 | GATTACTGATGCCTAGCGGC | 5748 |
| Parp1 | GCACGTGTCCTTGGGAGGTT | 5749 |
| Parp1 | GAAATTTAACAAATGGCGTG | 5750 |
| Parp1 | GTGGGTGAGGTGGAATTATT | 5751 |
| Parp1 | GGGCTTCAFCACGTGTCCTT | 5752 |
| Parp1 | GCTGGTCTCTGCCTCTGGGA | 5753 |
| Parp1 | GATAGATTACTGATGCCTAG | 5754 |
| Parp1 | GGGCAAGCTGCAGCTGTTTG | 5755 |
| Patz1 | GGCGTTCGGCACAAAGAAAG | 5756 |
| Patz1 | GGTAGACCTAGAGAGGGAGG | 5757 |
| Patz1 | GTCAAGGATGGTCCAGAAGA | 5758 |
| Patz1 | GTGTTCAACTGTGCTATTGA | 5759 |
| Patz1 | GAAACTGTGTACCTCAGTCT | 5760 |
| Patz1 | GGTATTACCATGCAAATGAA | 5761 |
| Patz1 | GATGCGCACGTGCTGAGTCG | 5762 |
| Patz1 | GGATCAGGCTGCGCTAGCAT | 5763 |
| Patz1 | GAAGGTAGACCTAGAGAGGG | 5764 |
| Patz1 | GTATTACCATGCAAATGAAC | 5765 |
| Pax1 | GACCAGCTCATTGCTTCCTT | 5766 |
| Pax1 | GGGCCAGAGGACTAAGGTGA | 5767 |
| Pax1 | GGAGAGGAATGAGTTCTGGT | 5768 |
| Pax1 | GAAACCACTACTCGCTCACT | 5769 |
| Pax1 | GTTCCTGGCTCAGGTATCCC | 5770 |
| Pax1 | GGGTAAGAGAAAGGCGGAGG | 5771 |
| Pax1 | GGAAGCCAAGAACTAGGAGG | 5772 |
| Pax1 | GGCACTCCTGTTATGAGTAC | 5773 |
| Pax1 | GGAAGGCTGCCCTGTTCTAA | 5774 |
| Pax2 | GAGAATCATGCGTGCGTGGA | 5775 |
| Pax2 | GGTAGGAGTCAGTCTGAGAC | 5776 |
| Pax2 | GAAGCCCTTTGTCTCCTAAC | 5777 |
| Pax2 | GTATAAGTCACATGCGGCTT | 5778 |
| Pax2 | GAGTTTGAGAGGCGACACGG | 5779 |
| Pax2 | GCTGGCGAATCACAGAGTGG | 5780 |
| Pax2 | GAACCAAGAGAGCTCAGGGC | 5781 |
| Pax2 | GGCGGTTCTAAATGCCCGGT | 5782 |
| Pax2 | GCATGCCTTCTCAGGACTCC | 5783 |
| Pax2 | GGCCAGCCTAATGAATATTC | 5784 |
| Pax3 | GGCTCCAAGTTGCAAGCAAT | 5785 |
| Pax3 | GGCAAAGACACGCGCTGATT | 5786 |
| Pax3 | GGGCAGACAGAGGAAATAAG | 5787 |
| Pax3 | GGCTTGGGATCCTGCACTCA | 5788 |
| Pax3 | GAACTGGAGAGTGCTAGGTA | 5789 |
| Pax3 | GCAACAAGTAGGGATGAAGA | 5790 |
| Pax3 | GACTTCCCTGGACACATGTG | 5791 |
| Pax3 | GCAGACCACACATGTGTCCA | 5792 |
| Pax4 | GTCTGGGTAGGGTAGGGTGC | 5793 |
| Pax4 | GGAGCTGGAATGGCCTTGGC | 5794 |
| Pax4 | GGGCTTCAGAGTCCACCTTG | 5795 |
| Pax4 | GGGTATTCAACATGAACACC | 5796 |
| Pax4 | GGATCGTTGGCTCCTGCCTT | 5797 |
| Pax4 | GAGCCTTCACTCAGGAGCAG | 5798 |
| Pax4 | GTATAATTGTGAGCAGATGG | 5799 |
| Pax4 | GCTTCACAGAGCCTTCACTC | 5800 |
| Pax4 | GTTGTAAAGACTGAGAGAGA | 5801 |
| Pax5 | GCAGTGTGTCAGGCCCAGAC | 5802 |
| Pax5 | GGCAGAAACGAAATAGTGAT | 5803 |
| Pax5 | GAAGGAGAACCTGAGTCACA | 5804 |
| Pax5 | GAGGCGGCATTGCTGCTCTC | 5805 |
| Pax5 | GGAAGGAGAACCTGAGTCAC | 5806 |
| Pax5 | GCAAAGGGCTGCAGAAGGGT | 5807 |
| Pax5 | GCTCTAGGGCCACTGGACAA | 5808 |
| Pax5 | GGTGTAGGAGAAAGCAGAAA | 5809 |
| Pax5 | GCCTAGAGTTCGAGGATAGG | 5810 |
| Pax6 | GAACCTAAGGACAGGCTACG | 5811 |
| Pax6 | GAGGACCTAAGGCACTGGAT | 5812 |
| Pax6 | GCTAATGGGCCAGTGAGGAG | 5813 |
| Pax6 | GTATTGTCCTCCCTGAGGTT | 5814 |
| Pax6 | GAGGGCTGCTGGAGCTTGTT | 5815 |
| Pax6 | GGGAAAGGTGGCTGACTAGC | 5816 |
| Pax6 | GACAGATAGATAAGCTGGCG | 5817 |
| Pax6 | GAAGAGTCTAAGGCAATGAA | 5818 |
| Pax6 | GACTTCTCTGATCTGGAACT | 5819 |
| Pax6 | GAAGTTCTGACTGGAAGGTA | 5820 |
| Pax7 | GAGGACCAGACCACAGAGTC | 5821 |
| Pax7 | GGGTCAGTAGCATGCTGAGA | 5822 |
| Pax7 | GGGAGACAGACAGATAAAGC | 5823 |
| Pax7 | GTCCACTAGAAAGGGCTCCA | 5824 |
| Pax7 | GTGGACTCAGAATCTCCTGG | 5825 |
| Pax7 | GCAGCTATGTGTCCTGTGCA | 5826 |
| Pax7 | GCGCTGAGAGGAGGGATCGA | 5827 |
| Pax7 | GAGGCGACATCAGCAAGGCT | 5828 |
| Pax7 | GGCGATTTCACATCCAGGAG | 5829 |
| Pax7 | GGGATCTTCTCTGTCCGCTC | 5830 |
| Pax8 | GGAGAATCTACAGGCCAGTG | 5831 |
| Pax8 | GAGTGAGAACTTTGGTCTGA | 5832 |
| Pax8 | GATGCTGCATTTAGGTACCT | 5833 |
| Pax8 | GAGCTTCTGTTTCTGGAGGA | 5834 |
| Pax8 | GAGGGACTGTTCTGCCTTGA | 5835 |
| Pax8 | GGAGATAGGTTGTTAGCTTG | 5836 |
| Pax8 | GGTTGCCTGCACAATCTTCC | 5837 |
| Pax8 | GTATGTGGGAGCAAATGTCC | 5838 |
| Pax8 | GAGTGGGAGATGAAAGCCTG | 5839 |
| Pax9 | GCCATGTCATCTCCAAGAAG | 5840 |
| Pax9 | GGCACTGTGTGCCCTTGCTT | 5841 |
| Pax9 | GGGCTAAACCTCAGTCAAGC | 5842 |
| Pax9 | GTTCGTGCCCATCCAAAGCT | 5843 |
| Pax9 | GGAGGTGTGCGACAGCTAAA | 5844 |
| Pax9 | GGTCTCCTCTGGACAATTAC | 5845 |
| Pax9 | GGAGGGTCAGAGCAAACAGC | 5846 |
| Pax9 | GCTAAGACTCCTGGGATCTG | 5847 |
| Pax9 | GAATTGAGTGCGGGTTACTG | 5848 |
| Pax9 | GTGGAATCTAGCTCTTCCCA | 5849 |
| Pbx1 | GCAAACATTTGGCAAGATAA | 5850 |
| Pbx1 | GTAAGCGCAAGTGGGCTTTG | 5851 |
| Pbx1 | GAATCTCATAAAGTGTTGCC | 5852 |
| Pbx1 | GGTGTGAGGGAGAAAGATAA | 5853 |
| Pbx1 | GAGATCACTCTGGCCCGGAG | 5854 |
| Pbx1 | GATTTATGTCTTGGCCCACA | 5855 |
| Pbx1 | GCTGCACAAATCGTCTGAGA | 5856 |
| Pbx1 | GGCCAGAGTGATCTCAAAGG | 5857 |
| Pbx1 | GCCAGGTCAAGTATTAAGAG | 5858 |
| Pbx1 | GCAATAGAAACCGGAAGGCA | 5859 |
| Pbx2 | GGACTGAAGACTGGTATCTG | 5860 |
| Pbx2 | GAGGGAGGAGCAGATCTCCA | 5861 |
| Pbx2 | GCTCTCAGCGATCTGGCCAG | 5862 |
| Pbx2 | GACATGTGGGACCTAGTGAC | 8863 |
| Pbx2 | GTCAAACAAGCTGTTTGGGT | 5864 |
| Pbx2 | GACAGACTCAGCAGCAGGGT | 5865 |
| Pbx2 | GGGTCAAGATCTTCCAGGGT | 5866 |
| Pbx2 | GGGAACCAACCCAGGGAGAA | 5867 |
| Pbx2 | GAGAGGAGGGAGGAGGGAGA | 5868 |
| Pbx2 | GAGTTGCTGCTGAGAGTTCA | 5869 |
| Pbx3 | GGCGGGACAGAGCCAAGAAA | 5870 |
| Pbx3 | GACTTTCGAACGCTCCAATT | 5871 |
| Pbx3 | GGTAAGCCTTGTAGCTTGCC | 5872 |
| Pbx3 | GTCCACAGCGGCTGCTGACT | 5873 |
| Pbx3 | GTGAAGTTGACTACAGCCGA | 5874 |
| Pbx3 | GCGCAAAGCCCAATGAGAGA | 5875 |
| Pbx3 | GTCAAGATTATGAGCCTAGA | 5876 |
| Pbx3 | GCTGTCCTCAGTCTCCTCCG | 5877 |
| Pbx3 | GCAGTTCTTTAAATGCCAGA | 5878 |
| Pbx3 | GCTAATAATAGGGAAGGAGC | 5879 |
| Pcbp1 | GAACTGCTCGCTTGCTCCCT | 5880 |
| Pcbp1 | GCGCCTTGTGCTTTCTTTGC | 5881 |
| Pcbp1 | GGACCCGGCAGAGATTGAGA | 5882 |
| Pcbp1 | GACCTCCTCCAGGCTGACTA | 5883 |
| Pcbp1 | GCACCGCTCCTCTAAGGTCT | 5884 |
| Pcbp1 | GAGCCGGCAAAGAAAGCACA | 5885 |
| Pcbp1 | GTCAGGGCGACCTCCCAAGA | 5886 |
| Pcbp1 | GGAGCCAGGTGGAGGGAAAT | 5887 |
| Pcbp1 | GGGACCCGGCAGAGATTGAG | 5888 |
| Pcbp2 | GCTCAGGCCTAAATACGAAG | 5889 |
| Pcbp2 | GGATGACAAAGGTGAACCTC | 5890 |
| Pcbp2 | GCTTTGGGATCAAGATAGGA | 5891 |
| Pcbp2 | GTTCTTCCGCTAGAGGCCAC | 5892 |
| Pcbp2 | GTGATACAAGCTGATACCAT | 5893 |
| Pcbp2 | GAAGAGGTGGCCAATGCTTT | 5894 |
| Pcbp2 | GGCCAAAGGTAAAGGGTAAA | 5895 |
| Pcbp2 | GTGGTGGAAAGAAAGACATT | 5896 |
| Pcbp2 | GTGGCCTCTAGCGGAAGAAC | 5897 |
| Pcbp2 | GAAAGACATTTGGAGTCACT | 5898 |
| Pcbp3 | GATGCTTCTCGAAAGTCTGG | 5899 |
| Pcbp3 | GAGTGGCTGGTTGCACGGAG | 5900 |
| Pcbp3 | GGTATCTAGGTACTGATGGA | 5901 |
| Pcbp3 | GGAAGACACACTTAGTCATT | 5902 |
| Pcbp3 | GAAGGCAGGAAGCCTGCATT | 5903 |
| Pcbp3 | GGCAACCTGTAATCTGGAGG | 5904 |
| Pcbp3 | GGCCTCTGCTGACCTTCAGC | 5905 |
| Pcbp3 | GTCCAGCTGAAGGTCAGCAG | 5906 |
| Pcbp3 | GCTACTTGGTTACTATGGTG | 5907 |
| Pcbp3 | GGTGGTTCTGATGGTCGGGC | 5908 |
| Pcbp4 | GAAAGCTGGAGGAGCCCATG | 5909 |
| Pcbp4 | GAGCCTGTAGAGGAAGCTTA | 5910 |
| Pcbp4 | GGTTACAGACTGCCTGCTCT | 5911 |
| Pcbp4 | GGTTACAGACTGCCTGCTCT | 5912 |
| Pcbp4 | GATCTCTTGCTGTCTTCTCC | 5913 |
| Pcbp4 | GAGCCATACAGGGAGGATCC | 5914 |
| Pcbp4 | GATCCGTGCTTGATTACCTG | 5915 |
| Pcbp4 | GCCGCGCTGTAATCGGATCC | 5916 |
| Pcbp4 | GGAGAGACAACGGCAATGAA | 5917 |
| Pcbp4 | GCAGTTTCCTGAAGGATGGA | 5918 |
| Pdx1 | GTGGTTGAGCAGTTGGGCAA | 5919 |
| Pdx1 | GAAATGCGTATCACCCATAA | 5920 |
| Pdx1 | GAGCTGCTGTTAAATGGCTC | 5921 |
| Pdx1 | GAGTGTCTCTGATTTCTTCA | 5922 |
| Pdx1 | GCCTCTGACCTGGTCCTCCA | 5923 |
| Pdx1 | GGAGGACTGCCTTAAGAAGG | 5924 |
| Pdx1 | GGTGTTCGGTAGCAACCAAG | 5925 |
| Pdx1 | GCGAGACTTGGGACAAAGAT | 5926 |
| Pdx1 | GAAATTCCACTAAAGACGCC | 5927 |
| Pgr | GTCATGAGAACACTGTGGAG | 5928 |
| Pgr | GCAGATCATCGGTTACTGTG | 5929 |
| Pgr | GGTAGTAATGTTGCAAAGAA | 5930 |
| Pgr | GCAGGAGAACGAGTAAGAAT | 5931 |
| Pgr | GAGAAATGGCTGATTCTAGG | 5932 |
| Pgr | GCTGGGATTGTAGAGAACCT | 5933 |
| Pgr | GTGTGGGAAGCAAAGAAATG | 5934 |
| Pgr | GATCTAGCCAGTGATTGGCT | 5935 |
| Pgr | GCCATAGAGACTGTCGCTGC | 5936 |
| Phox2a | GGGACAGGATAAGGGACTCT | 5937 |
| Phox2a | GGATAAGGGACTCTCGGATT | 5938 |
| Phox2a | GTCACAAATCCCAGCTCTCG | 5939 |
| Phox2a | GCATCTTGTGTAGAGATCGA | 5940 |
| Phox2a | GAGGTCACAAGCTATTGGAG | 5941 |
| Phox2a | GACAACAGAGCTGAGAAGCC | 5942 |
| Phox2a | GACAGGGATGAGAAAGAGAC | 5943 |
| Phox2a | GCCAGGTCATTGACCCTCCA | 5944 |
| Phox2b | GTAGGGTGGCAGTGGAGAGC | 5945 |
| Phox2b | GCTGCGATGAAAGGCTTGTG | 5946 |
| Phox2b | GCTGGTTAGAAGGGAGGATC | 5947 |
| Phox2b | GCCCTGTAACATAGCGTAAG | 5948 |
| Phox2b | GCAGCTTGGAGCCAGACTAC | 5949 |
| Phox2b | GCAGGAAATGCCCTCGGAGG | 5950 |
| Phox2b | GAAAGAGAGTGCGAGAGCAA | 5951 |
| Phox2b | GAACACAGTGTAGAAATTCG | 5952 |
| Phox2b | GGCCTCAGCCCTAACTCCCA | 5953 |
| Phox2b | GGTACATTTCGTGCTGGGCT | 5954 |
| Pitx1 | GGAAAGCTACAATCTTTCTG | 5955 |
| Pitx1 | GGTAACTTTGCTCCAGTGTG | 5956 |
| Pitx1 | GACTGATGTCTCACAACCCT | 5957 |
| Pitx1 | GGAATCACGGATGGCCCTGG | 5958 |
| Pitx1 | GGATCTATGAGGATAGTGGA | 5959 |
| Pitx1 | GTGGTAGAGAAGGTAGGAGA | 5960 |
| Pitx1 | GAGCAAAGTTACCCTAAAGG | 5961 |
| Pitx1 | GCCGAGTGGAGGACTCTCAT | 5962 |
| Pitx1 | GACCACTCTTGTGAGCCTAG | 5963 |
| Pitx1 | GTCGCTTCTCCCAGGAACTC | 5964 |
| Pitx2 | GTGGGAGAGCCACAGCCGAT | 5965 |
| Pitx2 | GGGCACAGCAAGGAATTAGT | 5966 |
| Pitx2 | GGGATGGTAGGAAAGGGACA | 5967 |
| Pitx2 | GTTCAGGAAGTATTCCGGTG | 5968 |
| Pitx2 | GTGAGCTAGCGGCAGAAGGT | 5969 |
| Pitx2 | GCATTGTGGGAGATGGCACT | 5970 |
| Pitx2 | GAGGTTTGCAGCCAGGGCTG | 5971 |
| Pitx2 | GAGAAATGCAGTTTAATGGC | 5972 |
| Pitx2 | GTCATTGGCTGGCAAGTGCC | 5973 |
| Pitx2 | GTCTGGGTGGCTTACGAGGA | 5974 |
| Pitx3 | GCATAGACACAGGGAGTTGT | 5975 |
| Pitx3 | GAAAGACAGACAGCGACAAG | 5976 |
| Pitx3 | GACAACAGATTTGGTCCTGT | 5977 |
| Pitx3 | GGAGTCACGAGAAGCAGTGC | 5978 |
| Pitx3 | GATGCCTCCCTGGCTTCCAG | 5979 |
| Pitx3 | GAAAGATAGGATGGAAAGGA | 5980 |
| Pitx3 | GGACAGAGAACCCGGCTGTC | 5981 |
| Pitx3 | GTCAGGCGGGACAGAGAACC | 5982 |
| Pitx3 | GAGGCATACCTAGATAGGGA | 5983 |
| Pknox1 | GTACGCTGCTGCAGATGATC | 5984 |
| Pknox1 | GGAAGAACAGAGCCGTGCAC | 5985 |
| Pknox1 | GTCAGACCGCAGTCACTTCA | 5985 |
| Pknox1 | GCCCTCCAGCAATGTAGTGG | 5987 |
| Pknox1 | GCCCTGGGACACCAAAGCAC | 5988 |
| Pknox1 | GAGCTGTCTGTACTAGGAGG | 5989 |
| Pknox1 | GAGCCGGGACTGGAATCACT | 5990 |
| Pknox1 | GTGCCAAATGACCACAAACT | 5991 |
| Pknox1 | GCGCCTCGCAATCAAGGTTC | 5992 |
| Pknox1 | GAGAGGTCTGACTAGTGAAG | 5993 |
| Pknox1 | GTGGAGTTGCTGGCAGGACC | 5994 |
| Pknox2 | GCTGGGCACCGTAAGGTGAG | 5995 |
| Pknox2 | GCCTGAAACCGCTTCTCAAG | 5996 |
| Pknox2 | GATTCTCTGGTCCTCTGTGT | 5997 |
| Pknox2 | GTTGAGAAGCAGGGTGGACA | 5998 |
| Pknox2 | GGTGGACAGACCCAAAGGGC | 5999 |
| Pknox2 | GAGCACACACATATTTGTGA | 6000 |
| Pknox2 | GGAGTTCTTAAGATTCTCCT | 6001 |
| Pknox2 | GCTAGAGTGTCTCCCTCTAC | 6002 |
| Plagl1 | GGTTTCAAGGCATGGAGGCC | 6003 |
| Plagl1 | GGTTGGGAGAGCAGGCTGTT | 6004 |
| Plagl1 | GTGACAAATCGCAGATGCCG | 6005 |
| Plagl1 | GTGAATCACTAAGATCGGTG | 6006 |
| Plagl1 | GCTCGTCAACAGGGAGAATA | 6007 |
| Plagl1 | GACACTGTAAGAATGCCGTT | 6008 |
| Plagl1 | GTTACAGGGTTTCTGCCTGT | 6009 |
| Plagl1 | GTTTGCGATGTGGCCGAGGG | 6010 |
| Plagl1 | GGGAGAATAAGGTTTCTACA | 6011 |
| Plxna2 | GAAAGGTTGTACCAGGGTCT | 6012 |
| Plxna2 | GTTGGCTTTCTAGAATTTGT | 6013 |
| Plxna2 | GGAGTCTGGCTTTGCATCTC | 6014 |
| Plxna2 | GGGTCACCTAGGAAAGACAA | 6015 |
| Plxna2 | GGTCTAGGGACTCATGTCTT | 6016 |
| Plxna2 | GCCTGGTAAGCCAGCTGGCT | 6017 |
| Plxna2 | GACAGATCACACTGCAGGCT | 6018 |
| Plxna2 | GAAGACCCTGAGACCTTGCA | 6019 |
| Plxna2 | GTAATATAGGAGGCCGGCTG | 6020 |
| Plxna2 | GGGAGGCTTTGCTTGGTGAC | 6021 |
| Pml | GGAACAGAGAATAGGCACAT | 6022 |
| Pml | GGCCTATGAGAAGTAACTGT | 6023 |
| Pml | GTGGACAAGTTGAAGTCAGA | 6024 |
| Pml | GGGAACTTAGAAATGAGCTA | 6025 |
| Pml | GTCCCACAGTTACTTCTCAT | 6026 |
| Pml | GGTAGACAACAGGGAGGCAA | 6027 |
| Pml | GTCTTTCTCTTAACTTTGGA | 6028 |
| Pml | GCCAGTTTGGGAAGTAGTCA | 6029 |
| Pou1f1 | GGTGAAATATGACAATGCAT | 6030 |
| Pou1f1 | GACACTTAGGAAAGCATTGG | 6031 |
| Pou1f1 | GACAAAGCAACACTCCTGTG | 6032 |
| Pou1f1 | GTTGACACTTAGGAAAGCAT | 6033 |
| Pou1f1 | GGTACGTCCCTTACAGAGAT | 6034 |
| Pou1f1 | GTAGAGCTCCCATCTCTGTA | 6035 |
| Pou1f1 | GTAAGTAGAAATAAAGGGAT | 6036 |
| Pou1f1 | GTGTCTTCTCTGCGTATTCC | 6037 |
| Pou2f1 | GGTAGGAGGATGTGATGACG | 6038 |
| Pou2f1 | GGGTAGTCCAGAGTCCTTGC | 6039 |
| Pou2f1 | GTGTTCCCTTAATACATGAC | 6040 |
| Pou2f1 | GTTACACATGATGTAAACAA | 6041 |
| Pou2f1 | GCAATCTTCTCTCAGATGTG | 6042 |
| Pou2f1 | GTGAGGCTTGAAGAGAGGGC | 6043 |
| Pou2f1 | GGAGAGAGTACCAGCAGGTG | 6044 |
| Pou2f1 | ACTTTAGTGTCTCAGCTCTG | 6045 |
| Pou2f1 | GGGTTGGGTTTCTCTTCAGA | 6046 |
| Pou2f1 | GAATGTGCATCGTCCTCAAA | 6047 |
| Pou2f1 | GGTAAGAATAAATAGGTCCT | 6048 |
| Pou2f1 | GACTGGACAAGTTCTACTAT | 6049 |
| Pou2f1 | GTTCAAGTCACTGAACCTGG | 6050 |
| Pou2f1 | GGTAGGGATCTGTTTATTTA | 6051 |
| Pou2f1 | GGTCCAAGATGCCAGGCCAT | 6052 |
| Pou2f1 | GAATGAATAGTGTATCCACC | 6053 |
| Pou2f1 | GCATTTCCGTGGCCCATTTG | 6054 |
| Pou2f1 | GTGCCAGCATAATAATTAGG | 6055 |
| Pou2f2 | GAGCTGAGTTCGTTCCTGTC | 6056 |
| Pou2f2 | GATCCGGCGAGAAATATGAG | 6057 |
| Pou2f2 | GTGCCACAGGTAAGGCATCC | 6058 |
| Pou2f2 | GGAGTTGAGAGAGATGAACT | 6059 |
| Pou2f2 | GCTCGCTGAAAGCGCTCCAC | 6060 |
| Pou2f2 | GCAGCGTCCAGTCAATGGGC | 6061 |
| Pou2f2 | GGCACATGGCTTAGATGGTG | 6062 |
| Pou2f2 | GCCACTGTGCCACTGCTCAT | 6063 |
| Pou2f2 | GTAATTAAAGGAGACGCAGG | 6064 |
| Pou2f2 | GACAGCTAGAAGCCTGTCAG | 6065 |
| Pou2f3 | GAACTCTGCAGCCTATGTGG | 6066 |
| Pou2f3 | GACCATCCTCGGAAATGACT | 6067 |
| Pou2f3 | GAGATACGGAAATCACAGAT | 6068 |
| Pou2f3 | GGACCAGAGGTGATTGATGG | 6069 |
| Pou2f3 | GTCATTTCCGAGGATGGTCT | 6070 |
| Pou2f3 | GGACAGGTGTTCCTCAGGGT | 6071 |
| Pou2f3 | GATTGATGGTGGGAACCGGC | 6072 |
| Pou2f3 | GACAGGTGTTCCTCAGGGTC | 6073 |
| Pou2f3 | GTCCCTTCCTTCTTGCCAGG | 6074 |
| Pou3f1 | GTTGTGGCGCTGAGTCTAGA | 6075 |
| Pou3f1 | GGTCGCATCGCGTTCTCCCA | 6076 |
| Pou3f1 | GCTAATGACATCATCCTCAT | 6077 |
| Pou3f1 | GGTTACGCTGTACAGATTTG | 6078 |
| Pou3f1 | GATTTCTGGGTGCCGAGCTG | 6079 |
| Pou3f1 | GACTCTCAGACTGTCAAACT | 6080 |
| Pou3f1 | GCAGCAGCATGAACTAGGAA | 6081 |
| Pou3f1 | GTTCTCTCATTCCAGAACCC | 6082 |
| Pou3f1 | GACTCAGCGCCACAACTAGC | 6083 |
| Pou3f1 | GGCAACTAACTTTCCTCAGT | 6084 |
| Pou3f2 | GAGGAAGGACTGAGAAGACT | 6085 |
| Pou3f2 | GTGTAAGGGATCTTTGTTAC | 6086 |
| Pou3f2 | GTCTAGCTGTGTGTGTGTGT | 6087 |
| Pou3f2 | GGATGGTGGAAGAGAAAGAC | 6088 |
| Pou3f2 | GAGGCTTGGAAGACTTGTAT | 6089 |
| Pou3f2 | GCCACTTAGGCTGCGCCTTT | 6090 |
| Pou3f2 | GTTTCCAGATTTCTTTCCGA | 6091 |
| Pou3f2 | GGCGTGGACATTTCACAACC | 6092 |
| Pou3f2 | GTCTACTTTCTCTTCCCAAT | 6093 |
| Pou3f2 | GTTTATGAAAGTGTATGGAG | 6094 |
| Pou3f3 | GCGTGCCCTTGTGAGTTTGG | 6095 |
| Pou3f3 | GCCAAGGGAACGCAGACGTT | 6096 |
| Pou3f3 | GAAGCGGTTCCTTTCTTCCT | 6097 |
| Pou3f3 | GCTGCAGGTTTCCCAGATGA | 6098 |
| Pou3f3 | GCGGCTGCACAAAGTTGCAG | 6099 |
| Pou3f3 | GAAGAGTGCATTGGTGGAGG | 6100 |
| Pou3f3 | GGCACCCTCCAAACICACAA | 6101 |
| Pou3f3 | GCTTGCTATTCTTGGGCATG | 6102 |
| Pou3f3 | GCAATCTGGCCGCTCCTAGT | 6103 |
| Pou3f4 | GAGAGACCTCTGATGGAAAC | 6104 |
| Pou3f4 | GGATAACGTTTATTGGATCA | 6105 |
| Pou3f4 | GCAAATATAATTACACAGCT | 6106 |
| Pou3f4 | GAGGTCTCTCCACTATGCCA | 6107 |
| Pou3f4 | GATGCTCCTTAGCTATATAA | 6108 |
| Pou3f4 | GCCACCAAGATCTCTCTCAC | 6109 |
| Pou3f4 | GACCTCTGATGGAAACTGGC | 6110 |
| Pou3f4 | GGGAACCAAAGCCGCTAGCG | 6111 |
| Pou4f1 | GCCTTTCTATCTGTCATTTA | 6112 |
| Pou4f1 | GTCTGATTTCTGGGAGTTGA | 6113 |
| Pou4f1 | GCGGGAAATGGACTATGAGC | 6114 |
| Pou4f1 | GTTCATTTGCTGGTGCAAGA | 6115 |
| Pou4f1 | GCAGGTGATGCACCTGTAGC | 6116 |
| Pou4f1 | GCCCGTTATTGTTGAAGGGT | 6117 |
| Pou4f1 | GAGGGTGTCCAGCCTTCAGC | 6118 |
| Pou4f1 | GCTTGTTAGGCACCGGGTAG | 6119 |
| Pou4f1 | GCAGATCAAGGGCCTCTCTG | 6120 |
| Pou4f1 | GGGCAACTGCACCCTGTGTC | 6121 |
| Pou4f2 | GTGCCTAGTGCAGAAAGACG | 6122 |
| Pou4f2 | GCTAGTGCAAACCACTTTCC | 6123 |
| Pou4f2 | GAGCAACTGACAGGACGAGA | 6124 |
| Pou4f2 | GACTTGCCCAAACACTATTG | 6125 |
| Pou4f2 | GACTGTTCAAGTAAGTGCTT | 6126 |
| Pou4f2 | GGAGAGCAGGTGGCCAGGTA | 6127 |
| Pou4f2 | GGTCCCGTGGCAGAGAGAGA | 6128 |
| Pou4f2 | GAGAGGAAATAGGTTGTGTT | 6129 |
| Pou4f2 | GACCAGCAAGACACTGGCAA | 6130 |
| Pou4f2 | GTCCTTGCCCAGGCTTCTTA | 6131 |
| Pou4f3 | GCTTTCTTGGGTCTTGCTGG | 6132 |
| Pou4f3 | GGGAAGTAGTGGTATTGTCC | 6133 |
| Pou4f3 | GTGGCACAAAGCCAGTAATA | 6134 |
| Pou4f3 | GCGCCACTCTGAGCCTGATG | 6135 |
| Pou4f3 | GGAAGCGGGAATAAACATGG | 6136 |
| Pou4f3 | GGGTATAAATGCTGTGGAGG | 6137 |
| Pou4f3 | GAAGAGCCCAAAGTCAGACA | 6138 |
| Pou4f3 | GCTCGAGCTGCCTGGATGAA | 6139 |
| Pou4f3 | GGCAGTCCTGAGGAAAGAGG | 6140 |
| Pou4f3 | GACCCTTAAGAGGCTCCATG | 6141 |
| Pou5f1 | GACCCATGTGGTAGAAGGAG | 6142 |
| Pou5f1 | GGATGGCTGAGTGGGCTGTA | 6143 |
| Pou5f1 | GAAACCGGCCTGGATTGTTT | 6144 |
| Pou5f1 | GTGCAATGGCTGTCTTGTCC | 6145 |
| Pou5f1 | GACTTTGCAGCCTGAGGGCC | 6146 |
| Pou5f1 | GTCTGGACAGGACAACCCTT | 6147 |
| Pou5f1 | GCTTCCTCAATAGCAGATTA | 6148 |
| Pou5f1 | GAGTGCCTGTCTGCAAGGGA | 6149 |
| Pou5f1 | GAAGCCTGGGATGAGGAGGT | 6150 |
| Pou5f1 | GTGTCTTCCAGACGGAGGTT | 6151 |
| Pou5f1 | GCTTCCACTGGAGACGTTTA | 6152 |
| Pou6f1 | GGCCAGACAGACAGGTAGGC | 6153 |
| Pou6f1 | GTGCTGCTTGACTAGCCCGC | 6154 |
| Pou6f1 | GACAGACGTGAACTTGAGGT | 6155 |
| Pou6f1 | GGAGACTCAGAGGCCGATTA | 6156 |
| Pou6f1 | GCGAAGAGGGAAACACTGTT | 6157 |
| Pou6f1 | GGGATCTTGCTCTGCCCTGG | 6158 |
| Pou6f1 | GTCAAGTGGCTGGGCAGCAG | 6159 |
| Pou6f1 | GTGAGTCTGTTGTGAATGAA | 6160 |
| Pou6f1 | GGGAGACTCAGAGGCCGATT | 6161 |
| POU6F1 | GAAATCTCGTTTGCTCTTGC | 6162 |
| POU6F1 | GCAGGCTGGACAGTGATCTG | 6163 |
| POU6F1 | GCCGTCGCTTGCTTTAGTCT | 6164 |
| POU6F1 | GACAATCCCTACAGCAACTG | 6165 |
| POU6F1 | GGGGCAGCCACATTGCTGTA | 6166 |
| POU6F1 | GCATAAGGAGAAGACCTCAA | 6167 |
| POU6F1 | GATGCTTGCTTGTGCTCAGT | 6168 |
| POU6F1 | GCCAGCCCTTCAAGAATCAA | 6169 |
| POU6F1 | GGGAAAGGGAGTACAGTCAA | 6170 |
| Ppara | GAGTCCCAGGATGAGAAATG | 6171 |
| Ppara | GGAAGGAAGGTGTAACGTGG | 6172 |
| Ppara | GGTGAGTGCCAGTCCTAGGA | 6173 |
| Ppara | GACAGTGAGGTGGGTGGACA | 6174 |
| Ppara | GATGTCACCTGCAAATGTGT | 6175 |
| Ppara | GTCTGGGTTGAGCTTTCCTC | 6176 |
| Ppara | GCACGCTTCCAGGAGATCAG | 6177 |
| Ppara | GAGGGTACATGCCTGACTCT | 6178 |
| Ppara | GGCAAGTAGGGAATGTTCTG | 6179 |
| Ppara | GAGGCGTTTCCTGAGACCCT | 6180 |
| Ppard | GTGCACCCGATGCACTTTCA | 6181 |
| Ppard | GTGAGACCTAGAAGAGCAAG | 6182 |
| Ppard | GGGCGAGTGCTTAGTTGTGG | 6183 |
| Ppard | GCGGCGATTGGCTACTGCTA | 6184 |
| Ppard | GCTGATGATGGCAGCTGATG | 6185 |
| Ppard | GCCAGAAGGCAATCTGTCAC | 6186 |
| Ppard | GCTTGGGAGAGGCATATGGT | 6187 |
| Ppard | GGCAGCCTCCACTCCTAGTG | 6188 |
| Ppard | GTCAAAGGAGTGGCTCCAGG | 6189 |
| Pparg | GTCCTCAAATAATAAGACAC | 6190 |
| Pparg | GCACTAAAGTCTGTTGATTA | 6191 |
| Pparg | GCTAGGTTGGCAAGGAATTG | 6192 |
| Pparg | GGACATCGGTCTGAGGGACA | 6193 |
| Pparg | GTAATACATTATTCTCAGGG | 6194 |
| Pparg | GTCTTCCCAACCTTCTTCCA | 6195 |
| Pparg | GTCTCTGTTATTATCTGGGT | 6196 |
| Pparg | GGTTCATATAGGGACTCTAA | 6197 |
| Pparg | GACCTGTGTCTTATTATTTG | 6198 |
| Ppargc1a | GTCTGAGCACCCAAGTGTTA | 6199 |
| Ppacgc1a | GCAGGGCTCCGGTTTAGAGT | 6200 |
| Ppargc1a | GTAGTTACTGTGTCAGTAAC | 6201 |
| Ppargc1a | GTTTCTCTTTGTCATCCATT | 6202 |
| Ppargc1a | GAAGCAAACAGCAAGCTTGT | 6203 |
| Ppargc1a | GGACTCCAACCCTAGTGCCT | 6204 |
| Ppargc1a | GTCGTTCCTGAGTCAATGAG | 6205 |
| Ppargc1a | GGCCCAGTGAGAAATGCACA | 6206 |
| Ppargc1a | GAGAGAGAGAGAGACAACCC | 6207 |
| Ppargc1a | GGAAACACTTGGCCTTTGGG | 6208 |
| Prdm1 | GCAAACAGAGGAAGCTGCCG | 6209 |
| Prdm1 | GGCGAAATAGGCTTGAGTCT | 6210 |
| Prdm1 | GCTAACAGCCTGTTTCTTCT | 6211 |
| Prdm1 | GTCCTGGAGCAAATACTTCA | 6212 |
| Prdm1 | GCTGTGGGTTTGGGCATGAG | 6213 |
| Prdm1 | GCCTATTTCGCCACCTCGGA | 6214 |
| Prdm1 | GCTGAATGTATTCAGTTAGC | 6215 |
| Prdm1 | GGGACAAGAGTAGAATACAC | 6216 |
| Preb | GATGGACAAACACTCTAACT | 6217 |
| Preb | GCGGAGGATGCTCTCAAAGT | 6218 |
| Preb | GGATGGACAAACACTCTAAC | 6219 |
| Preb | GTGCTGATAAACACCCACTT | 6220 |
| Preb | GTTGATTGGACTCTTTCTTA | 6221 |
| Preb | GTCTGTCCTCCACACAACCC | 6222 |
| Preb | GAGCATCCTCCGCGGTTGAT | 6223 |
| Preb | GTCCTTCCCTCTGCCCTTGT | 6224 |
| Preb | GGGAGAACCCATTTCCTCCC | 6225 |
| Prkaa1 | GCTCTGGATTCTCTCAAGGA | 6226 |
| Prkaa1 | GCAACATCCTGTTGACGTAA | 6227 |
| Prkaa1 | GCTATGTGAATTCCAGAAAG | 6228 |
| Prkaal | GCTTGCTTACACGTTGCCCG | 6229 |
| Prkaa1 | GTAAGCAAGCATCGTCCTCC | 6230 |
| Prkaa1 | GGCGTGCTTTGAAACAAGAC | 6231 |
| Prkaa1 | GCGTGCTTTGAAACAAGACA | 6232 |
| Prkaa1 | GGTGTCCCATAGTAATTTAC | 6233 |
| Prkaa1 | GGATGTTGCCAAGGAGCGAA | 6234 |
| Prkar1a | GACAATAAAGGAGACAGAAA | 6235 |
| Prkar1a | GAATACCCAGACTATGATAA | 6236 |
| Prkar1a | GTCTGGCATAATAGGAGGCT | 6237 |
| Prkar1a | GTGGCTGACACAGGAAATGG | 6238 |
| Prkar1a | GGTTTGACCCACACACGCTA | 6239 |
| Prkar1a | GGATGCTGAGATGCTCCTGA | 6240 |
| Prkar1a | GGTGCTTCTGTAGGCACGGT | 6241 |
| Prkar1a | GGCCAATGGATAGTTGAGCC | 6242 |
| Prkar1a | GGAGACTTCCAAGAGGAGCC | 6243 |
| Prkar1a | GTGGGTGCATGCTTCAAAGG | 6244 |
| Prkar1b | GCTGGGAAATGCTCATGTCA | 6245 |
| Prkar1b | GGTCAGTGTAGATAGACGAG | 6246 |
| Prkar1b | GGACGATTGGGCCAGAGACG | 6247 |
| Prkar1b | GCCCACATTCCCTATCGTTC | 6248 |
| Prkar1b | GTTGGTTCCATAATTCCTGA | 6249 |
| Prkar1b | GCACATGAGTTACTTAGGAA | 6250 |
| Prkar1b | GAGACATGTGTGTCAGGAGG | 6251 |
| Prkar1b | GAGTCAGGACAGGTGAGTGG | 6252 |
| Prkar1b | GAATGTGGGCAGGTGAGTGG | 6253 |
| Prkar1b | GTGGACTGGAGAATATAGAC | 6254 |
| Prkar1a | GCCTTTATGGGCGGTGCTAG | 6255 |
| Prkar1a | GCCTTTCAGTTAGCATAAAT | 6256 |
| Prkar2a | GCTGGGAACTGAGCTGTGTA | 6257 |
| Prkar2a | GCCCTCTGAATGCTGTCTGT | 6258 |
| Prkar2a | GTCCTGTAGCTGGACAGGCT | 6259 |
| Prkar2a | GAGGAAGACAACATGGGATG | 6260 |
| Prkar2a | GACGTCGTGAGATGTCAAAG | 6261 |
| Prkar2a | GGTCTACCTAGCTTACAGCC | 6262 |
| Prkar2a | GGTTTGTGCCAGGCCTTTAT | 6263 |
| Prrx1 | GGTGCTTTCGGAGATGCCAA | 6264 |
| Prrx1 | GATACTCCAGAAGACTGTCA | 6265 |
| Prrx1 | GTTCTTCCTAGAAGGTCTCC | 6266 |
| Prrx1 | GGCACTTAATGATATTTCTG | 6267 |
| Prrx1 | GGCTCTCTACGATCTAAAGA | 6268 |
| Prrx1 | GACTGATGCTGTCTGGCCTT | 6269 |
| Prrx1 | GAACATTTGATGCCATCAAA | 6270 |
| Prrx1 | GCTACAGGTTTCTAGAACAA | 6271 |
| Prrxl | GTGCTAATCTGTATCCAGTT | 6272 |
| Prrx2 | GCAGTGGCACCTGTAATCCC | 6273 |
| Prrx2 | GTCAGCAATGAATGGATGAT | 6274 |
| Prrx2 | GGGAACAATGAGGGACAATC | 6275 |
| Prrx2 | GGTCTTCAGGGTGTCAGAGG | 6276 |
| Prrx2 | GGATGGGTGGTTGGGTTCTG | 6277 |
| Prrx2 | GGACTTGCCTCCCAGAGGGA | 6278 |
| Prrx2 | GTTAAGCCTTGCTACTTACT | 6279 |
| Prrx2 | GTCTTTCTGGCAGTAGCAAG | 6280 |
| Prrx2 | GGGAAGTAGAGACAAGCCCT | 6281 |
| Prrx2 | GGACACCCATAACTGATACA | 6282 |
| Ptf1a | GCTGTCTGTTGAGGAACTGC | 6283 |
| Ptf1a | GCCCTCTCCAACCTCAAGAA | 6284 |
| Ptf1a | GTCTGTGAGAAAGTGTGTCT | 6285 |
| Ptf1a | GCCAGTCAGAAAGGTGAAAC | 6286 |
| Ptf1a | GGATTCTTGCAAGTTTGCGA | 6287 |
| Ptf1a | GTGGACTTTATCAGCTTACT | 6288 |
| Ptf1a | GCCCACTGCCCAGATAATTC | 6289 |
| Ptf1a | GCCACTTTCTAGTGAGATGG | 6290 |
| Ptf1a | GCCCAGATAATTCTGGATTC | 6291 |
| Ptf1a | GGTTATATATTCTTCTTGCA | 6292 |
| Ptn | GCCTGGTAATGTGTGTACCA | 6293 |
| Ptn | GTTAGTTTCTCCCAGCAGGA | 6294 |
| Ptn | GTAAGCCATAACAGTTTCCC | 6295 |
| Ptn | GCTGTCACAGCCATGTTCAT | 6296 |
| Ptn | GATGTGCATAGCCTGGGAGT | 6297 |
| Ptn | GCAATTTGTGTGTGGAAAGG | 6298 |
| Ptn | GTCATCTTCTTAGCTCACTG | 6299 |
| Ptn | GGTATCTGTCACTGAGGGAT | 6300 |
| Ptn | GTTTCTCCCAGCAGGAGGGC | 6301 |
| Ptn | GAAGAACAATCCCATGAACA | 6302 |
| Ptn | GGAGGGCAAGGGAGCTGAAG | 6303 |
| Ptx3 | GCTTCACTTATTTGAGATCA | 6304 |
| Ptx3 | GGGAAGGGTCACACTGAACG | 6305 |
| Ptx3 | GGAGCAGAGGAATTTACCTA | 6306 |
| Ptx3 | GCCACTCATGAGTCTCTGTC | 6307 |
| Ptx3 | GGTGAGGAGCACAGAGGTAC | 6308 |
| Ptx3 | GGTCTTGAGAAAGTATCCAA | 6309 |
| Ptx3 | GTGAGGAGCACAGAGGTACA | 6310 |
| Pura | GAAGCATAACAACCAAGAGT | 6311 |
| Pura | GATGGAAGTGATCATCAGGA | 6312 |
| Pura | GCCAGCAAACCATGCAGCCT | 6313 |
| Pura | GCCAGGAAGTTTCTTCAACA | 6314 |
| Pura | GGTCATCGAAAGATAGTTTG | 6315 |
| Pura | GTCAACAATAAAGTACAGTT | 6316 |
| Pura | GGCAGCGAGCCTTTCATCTC | 6317 |
| Purb | GAGGAACATATGTCTCCAGA | 5318 |
| Purb | GATTACCCAATACATAGTAC | 6319 |
| Purb | GAAACCGTATTTAGAATAGG | 6320 |
| Purb | GTGGAGGAGCCACATGGACA | 6321 |
| Purb | GGTCAGTCTAGTATTGGGCT | 6322 |
| Purb | GATGTTAACAGGTGGAGATA | 6323 |
| Purb | GGAGCAATCACATAAAGCAA | 6324 |
| Purb | GATTTGAGCAGTGTGTCCTG | 6325 |
| random | GACTGTCGTATTGCGAAACT | 6326 |
| random | GTTACGATTTGTGCCCGGCC | 6327 |
| random | GCACCGCCGTACTCTACACT | 6328 |
| random | GGGCGCACGATGTCGTATAG | 6329 |
| random | GGGTGCAAAGTAACGCGGCC | 6330 |
| random | GTCCGAGGAGTACGAAGGGT | 6331 |
| random | GTCAAGTGGACTGCGAGGGT | 6332 |
| random | GGTTACGGGCGGAGAGGGAT | 6333 |
| random | GCGGTATAACTACCAAGGGT | 6334 |
| random | GCGCCAGCGATGTTGAGGGT | 6335 |
| Rara | GAAACAGGGTGCCTGGCTGA | 6336 |
| Rara | GGAGAGAACTGAGGCACACT | 6337 |
| Rara | GACTTCTTGAAACCTGTTTG | 6338 |
| Rara | GGCTTGTCTGTAAAGGTTCT | 6339 |
| Rara | GGCGGAAATCCAGACGGGAG | 6340 |
| Rara | GCACACTCCACTCCACTCCA | 6341 |
| Rara | GGTTCTCACACCCTTCAGCC | 6342 |
| Rara | GGTGAAGGGCCAGAAGACCA | 6343 |
| Rara | GAAGGTAGGTAGCACAGCTC | 6344 |
| Rara | GCATAGAACCTGGCTGGGTA | 6345 |
| Rarb | GCTGGGCATTCAGAACACAT | 6346 |
| Rarb | GGCTCCTGATGGGCAGTTCG | 6347 |
| Rarb | GCTTCAATATGCCTTGCCCA | 6348 |
| Rarb | GGGACTTCACAAGGAAGCTG | 6349 |
| Rarb | GCTGAAGGGAGAGCTCTCAC | 6350 |
| Rarb | GATTGGCGTGGGTTCAGACA | 6351 |
| Rarb | GAAGGTTAGCAGCCCGGGAA | 6352 |
| Rarb | GCTGGGAATTCTCCCACAGG | 6353 |
| Rarb | GCAGCAGCCTCCTGGAGAAA | 6354 |
| Rarb | GGGAAGGACACTGACACACA | 6355 |
| Rarg | GGCAAAGAAGGCGGGAACGG | 6356 |
| Rarg | GACCTTTCAGATTTCGGAGG | 6357 |
| Rarg | GTAGACTCCGCTGCGCTGGA | 6358 |
| Rarg | GAGTTTGGCCTGGACTGGGT | 6359 |
| Rarg | GATGGTCACGACTCCAGAAG | 6360 |
| Rarg | GAAGAAAGGGTTGAAGGGAG | 6361 |
| Rarg | GCATCTGCTGGAGAGAAAGG | 6362 |
| Rarg | GCGTAGCGCAAGGCATCTCA | 6353 |
| Rarg | GGGTGTGAGGGAGAAAGCCC | 6364 |
| Rarg | GTGATATCCTGGAGGTCAGA | 6365 |
| Rax | GAGCTTGTGGTTATTACTGC | 6366 |
| Rax | GTCCTGTGGGACTGGAACCT | 6367 |
| Rax | GACTAACACTTCAGTGAGGC | 6368 |
| Rax | GTGGCTGAACCAGTGCATGC | 6369 |
| Rax | GTCAGCCACAGGTTGGAGCT | 6370 |
| Rax | GTGGGAGGTTTGACAGGAGG | 6371 |
| Rax | GATTAAGGGAAGATTCAAAC | 6372 |
| Rax | GAATCCTGCATCTCTGAGGC | 6373 |
| Rax | GAGCCAGTCAGGACCATTGT | 6374 |
| Rb1 | GGCTACATACAGTCTAGGTT | 6375 |
| Rb1 | GAGGAATCGAGAACTTAATT | 6376 |
| Rb1 | GGAATGTAGCCCAGGAGAGG | 6377 |
| Rb1 | GGCTGTCCTGTGTTCTCATG | 6378 |
| Rb1 | GGTGAAGGAGAAATGGAGGC | 6379 |
| Rb1 | GACAGCCGGTCAAACTGGGA | 6380 |
| Rb1 | GCTCAGGCTACATACAGTCT | 6381 |
| Rb1 | GTTCACTTTGTCCCAGATTT | 6382 |
| Rb1 | GTTTCTGGTAGTTTGCCACC | 6383 |
| Rb1 | GGAGGTGTCCAATAGCCAGG | 6384 |
| Rbl1 | GCTTTGACCCTCGATGGAGG | 6385 |
| Rbl1 | GTCTTACATGACGTATCGGA | 6386 |
| Rbl1 | GGATGCAGGGACAAGGGTTT | 6387 |
| Rbl1 | GGTCCTCGCGCTTACCTGAA | 6388 |
| Rbl1 | GATGCAGGGACAAGGGTTTG | 6389 |
| Rbl1 | GGGTCCACAGGACAGTGTCA | 6390 |
| Rbl1 | GGGTCAAAGCTCAGTGAGAG | 6391 |
| Rbl1 | GGGATGCAGGGACAAGGGTT | 6392 |
| Rbl1 | GAACTAGCTTGATATTCCCA | 6393 |
| Rbl2 | GCAACACATGTGAGTTATAC | 6394 |
| Rbl2 | GTCAACGCTATCAATGGCAA | 6395 |
| Rbl2 | GAGTTATACAGGTTGATCTC | 6396 |
| Rbl2 | GTATAACTCACATGTGTTGC | 6397 |
| Rbl2 | GCCATTGATAGCGTTGACAT | 6398 |
| Rbl2 | GACATCAAGAGCAGGGCTGT | 6399 |
| Rbl2 | GCTAAGGCAGCCCAGACACC | 6400 |
| Rbl2 | GATTACATGCCATTAAGCTC | 6401 |
| Rbmxl1 | GGAGTTCCTGCTGACGTGTG | 6402 |
| Rbmxl1 | GACTTGCTCTGCTGCATGTC | 6403 |
| Rbmxl1 | GACCACATCAGAGGTTAGTT | 6404 |
| Rbmxl1 | GCTTGGCCGTGTATGCACGG | 6405 |
| Rbmxl1 | GTAATGTGACCTGTGGACAC | 6406 |
| Rbmxl1 | GTCGGGATAGTGGTGGCGAT | 6407 |
| Rbmxl1 | GTTAGGGAACAATGGAAACC | 6408 |
| Rbmxl1 | GAGATTATTGGCGGGAGCGG | 6409 |
| Rbmxl1 | GAGTCACGGGCTGCACTAAC | 6410 |
| Rbp3 | GTTTACCAAGTGGTTTAGGA | 6411 |
| Rbp3 | GGTGTAGAAAGCATATCACA | 6412 |
| Rbp3 | GCCTGGAGTTGGATTCTTCC | 6413 |
| Rbp3 | GGCTCCATTGCTCTTAGGCC | 6414 |
| Rbp3 | GTCTGACAGGCACTATGACA | 6415 |
| Rbp3 | GAAACCTACAAGTCAGTTTC | 6416 |
| Rbp3 | GGCACACAGAGGCCTCTGTG | 6417 |
| Rbp3 | GGGAGAGGGTGAAGACTACC | 6418 |
| Rbpj | GTTGTGTCTGAGCCGAGCGG | 6419 |
| Rbpj | GATGAAACAGTACCTAGAAC | 6420 |
| Rbpj | GGAAAGTACCAGGCTCGGGA | 6421 |
| Rbpj | GGCTTGTAGTGGTGGCTCTG | 6422 |
| Rbpj | GCAGCCAGCTTGCAGGATGT | 6423 |
| Rbpj | GCAGGGAGGATCAGCAGGTA | 6424 |
| Rbpj | GTCGTGCGGGAGCAAATGAA | 6425 |
| Rbpj | GGAAAGCAAAGGGCCGGGAA | 6426 |
| Rbpj | GAAAGCAAAGGGCCGGGAAG | 6427 |
| Rbpj | GAGCAGATCCCTTAGTCCGC | 6428 |
| Rbpjl | GCCCACTAGGAACTGCCTCA | 6429 |
| Rbpjl | GGTCTGGCTTCTACTGCCGT | 6430 |
| Rbpjl | GGAAGGATGGGTGTGTGTAT | 6431 |
| Rbpjl | GCTCCAGTCTGCAGGTGAGT | 6432 |
| Rbpjl | GGGCAGATGTAGGCTTCCCA | 6433 |
| Rbpjl | GTCTTGGTCATCGTGACAGA | 6434 |
| Rbpjl | GAGTTTGGCCTGCAGTTCCA | 6435 |
| Rbpjl | GCTCCCTTCCTCCCATGGTG | 6436 |
| Rbpjl | GAGAGAGTGGCCAGCAGCAG | 6437 |
| Rbpjl | GCATCTGCATTGCCTGAGCT | 6438 |
| Rel | GTGACGTCATGCTGGCCGAG | 6439 |
| Rel | GATATTCCACATCATAGACC | 6440 |
| Rel | GAGAGCGCCGCTTAAAGCCG | 6441 |
| Rel | GAGATTGGCCGAGATACCCA | 6442 |
| Rel | GCATTAGTATGCAGTATGCA | 6443 |
| Rel | GCCTCAGGCCGTGGGTATCT | 6444 |
| Rel | GCTCTCAAGGACTCTGGAGG | 6445 |
| Rel | GCATACTAATGCTGAGAGAA | 6446 |
| Rela | GCTGCCTCCACTATGCCAGA | 6447 |
| Rela | GCTGAAACCTCCTGTGGCCC | 6448 |
| Rela | GCTGCATCCGACAGGCCTTA | 6449 |
| Rela | GGCCTTGAAGGAGATGTTCA | 6450 |
| Rela | GAAACTGAAATGAGTGGGAG | 6451 |
| Rela | GTTCATGTGAGGACCAATGA | 6452 |
| Rela | GATGGGAAGAGCCTGAACTC | 6453 |
| Rela | GCGCAGCCGGATCTAGGTTG | 6454 |
| Rela | GAGAAACTGAAATGAGTGGG | 6455 |
| Relb | GACGTCACGTCAAAGGGAAT | 6456 |
| Relb | GTACCAGTGGGCAGAGCCTC | 6457 |
| Relb | GTTGGTTTGCGTTGAGACAA | 6458 |
| Relb | GGCTGCTAACTTCCCACTCC | 6459 |
| Relb | GGTGTGTGTGTGTGTGTGAC | 6460 |
| Relb | GACAGTACATGGTGCATCCA | 6461 |
| Relb | GACATATCCAGTGCCCTTAT | 6462 |
| Relb | GACAAGGGCCTGCTATGCAG | 6463 |
| Rest | GATCTCAGCGCCGTGCGGAA | 6464 |
| Rest | GGAGCCGCACATTCCAGCAC | 6465 |
| Rest | GCATAAAGATCTGTGTAGGC | 6466 |
| Rest | GCGTCCTGTGCTGGAATGTG | 6467 |
| Rest | GAGGTTCACACATTTAGATC | 6468 |
| Rest | GAAATAGTAACAAAGTAGCC | 6469 |
| Rest | GGAAACTTACCTAATCCGCC | 6470 |
| Rest | GACAATACTTCTCAAGAGGG | 6471 |
| Rest | GTACCTGACGTCTTATAATG | 6472 |
| Rest | GAGGCTGGAAGCAGAGCTTC | 6473 |
| Rfx1 | GACTGCATTTGTTTGACATT | 6474 |
| Rfx1 | GAAGTACAACCAAGTCTTCT | 6475 |
| Rfx1 | GCAGCCCTGAGAATTACAAG | 6476 |
| Rfx1 | GCTGCAACTGACCTATCTCT | 6477 |
| Rfx1 | GCTCTCTTGCACAGGTCCAC | 6478 |
| Rfx1 | GGCGTGTGACGTAGTAGGGT | 6479 |
| Rfx1 | GGCCACAGATAGAGCCTGTA | 6480 |
| Rfx1 | GTGACAGGTGAACACATACA | 6481 |
| Rfxl | GTCTTCACAGAAGTGGCAGT | 6482 |
| Rfx1 | GCCAGGCTGTGACCTTTCCG | 6483 |
| Rfx2 | GGAGGCGCTCACCGTCTAAG | 6484 |
| Rfx2 | GTGCCACAACACCACTTTGT | 6485 |
| Rfx2 | GGTCTTTAGCAAGGAGACTG | 6486 |
| Rfx2 | GAGGACAGAGAAGCGAGATG | 6487 |
| Rfx2 | GTAACTATCATGGAGGCAAA | 6488 |
| Rfx2 | GGTTTCCAACCCATGAGCTC | 6489 |
| Rfx2 | GGGAAGGGTTGGCTCTAAGG | 6490 |
| Rfx2 | GCCTTGCGCCTGCTCTTTCA | 6491 |
| Rfx2 | GGGCACTATGAAAGCCAATG | 6492 |
| Rfx2 | GAGGTCATGGGTTGGAAACC | 6493 |
| Rfx3 | GTCGCCAGTGTGGTGTTTCC | 6494 |
| Rfx3 | GAGAAAGCGGAATTCGATGG | 6495 |
| Rfx3 | GCGCGCGTCTCACACAGTGT | 6496 |
| Rfx3 | GAACGGTGACCCATCTCGCT | 6497 |
| Rfx3 | GTTAAGTGATGGGGAGGTAA | 6498 |
| Rfx3 | GTGTGTGTGTGAGAGAGGGC | 6499 |
| Rfx3 | GCACTCACAAGGTTGACATA | 6500 |
| Rfx3 | GGTAACTTCTTACTCTGGTA | 6501 |
| Rfx3 | GCGCTTGATTCACAAGGCAA | 6502 |
| Rfx3 | GTGACTGACAGCTCGGAGCC | 6503 |
| Rfx5 | GACCACGCAGAACGAGGCAC | 6504 |
| Rfx5 | GCGTGTATCCAGGCAGATCG | 6505 |
| Rfx5 | GAGATCTCTTTGGGTATACA | 6506 |
| Rfx5 | GGAAAGGGTTCTGTTCTTAA | 6507 |
| Rfx5 | GGATGTCGTGGGATGACGTA | 6508 |
| Rfx5 | GGGAACAGGGTCCCAGATTC | 6509 |
| Rfx5 | GGCTGGAGGTGTTGCAGCAC | 6510 |
| Rfx5 | GGCTGCCTCAGGTCTTGGTT | 6511 |
| Rfx5 | GATCGACCGCGGGCTTTACT | 6512 |
| Rfx5 | GAAACATGAATAGGCAAAGG | 6513 |
| Rfx7 | GAGAATTGACAAAGTGGCTG | 6514 |
| Rfx7 | GAGTGCGTTTACGGCGACTT | 6515 |
| Rfx7 | GCTTCCAGTCTGTATGAACC | 6516 |
| Rfx7 | GCCTCACATTGCCACATTCG | 6517 |
| Rfx7 | GTCTGTATGAACCAGGCCTG | 6518 |
| Rfx7 | GTTACCTTAAACCTTGGGTA | 6519 |
| Rfx7 | GAGCTGTGTGTCTCCGAGCC | 6520 |
| Rfx7 | GCTGTCTATGAATGGGAAGG | 6521 |
| Rfxank | GCAGTCCTATGCGAGCGTGT | 6522 |
| Rfxank | GGGATGGTCTCTAGACAGCA | 6523 |
| Rfxank | GTAGCAGGGAGTCCTTGACG | 6524 |
| Rfxank | GGAGTTAGAGAGGAGCCGCC | 6525 |
| Rfxank | GCTGTGTGGGAACAGCTCTG | 6526 |
| Rfxank | GGTGTTGCGGGACCCTAGAG | 6527 |
| Rfxank | GTCATCTGCAGGTCCAGGGA | 6528 |
| Rfxank | GTCATCTGCCACCATTAGCC | 6529 |
| Rfxank | GTATGCTCCAGTTATAAAGG | 6530 |
| Rfxank | GAGTTAGAGAGGAGCCGCCA | 6531 |
| Rfxap | GACAGCTGCGCATGCGCAAT | 6532 |
| Rfxap | GGCACGTTCTTTAGCTTCCT | 6533 |
| Rfxap | GCCATCCGCAAGCGATTCCT | 6534 |
| Rfxap | GTGCAGGCTGACCAAGAACC | 6535 |
| Rfxap | GAACAGTGCCTAGTGAAGTT | 6536 |
| Rhox11 | GGAGGCACTTCCCTTGTCTG | 6537 |
| Rhox11 | GACAATGATCACTCTGGAGA | 6538 |
| Rhox11 | GCTAATGCTACTGACTGTCT | 6539 |
| Rhox11 | GATTTCCCAAACAGGCTTAC | 6540 |
| Rhox11 | GAATAAGTCACCCATATTGA | 6541 |
| Rhox11 | GTACCTGAAAGTTCTGTATT | 6542 |
| Rhox5 | GAGGTCTTCAGGAAGCTGTT | 6543 |
| Rhox5 | GAACATTGGGATGATGTCAT | 6544 |
| Rhox5 | GTAATTGCCTCCCATTCACT | 6545 |
| Rhox5 | GGCTAAAGAGGAGAGAACAT | 6546 |
| Rhox5 | GGTCTCTCTTCCTTTGTCTA | 6547 |
| Rhox5 | GGATGTGGCAATGTATCTCA | 6548 |
| Rhox5 | GTCTCTCTTCCTTTGTCTAT | 6549 |
| Rhox5 | GAAGAAGGAGGAGGAGGAGG | 6550 |
| Rhox5 | GAAAGTGTGCACTTTCTCAA | 6551 |
| Rhox6 | GCCCTAACTACACAGGCTAT | 5552 |
| Rhox6 | GCTGACACTAGCTGCAAGCC | 5553 |
| Rhox6 | GGCTTGCAGCTAGTGTCAGC | 6554 |
| Rhox6 | GAAATGTATCTCAGAATCCA | 6555 |
| Rhox6 | GCACGAGGAGTTATGCTTAG | 6556 |
| Rhox6 | GATTAGCTGCTCTACAAGCC | 6557 |
| Rhox6 | GCTTTCCTTTAGGACTTGGT | 6558 |
| Rhox6 | GCAGAGGTGCTAGGGCTACA | 6559 |
| Rhxo9 | GGAGACTCTGATGGGCGAGT | 6560 |
| Rhox9 | GGTTGTGCAAGCTCAGTATG | 6561 |
| Rhox9 | GCTTCTTCCCTGAGGCGCAC | 6562 |
| Rhox9 | GAGATGGCAATGAACAGACT | 6563 |
| Rhox9 | GGCCTGAGCAGTGACTGTGA | 6564 |
| Rhox9 | GCTAGAAATTTCGGAGCCCG | 6565 |
| Rohx9 | GAGATTCAACTGGATCCTGG | 6566 |
| Rnf2 | GAACATTCCGCTTTGATGGA | 6567 |
| Rnf2 | GGTCGATATAAAGAGTAGCA | 6568 |
| Rnf2 | GTTCCTCCATCCTCTGGAGA | 6569 |
| Rnf2 | GAGTAGCAAGGAGATCATTA | 6570 |
| Rnf2 | GAGGGAAGGCGCAAACCTGT | 6571 |
| Rnf2 | GAACACTGAAAGCGTCAAGG | 6572 |
| Rnf2 | GCGCCTATTTCCAGAGTTGA | 6573 |
| Rnf2 | GTTTCTGCTGCAGAACTTTC | 6574 |
| Rnf2 | GACTACCCGTCTCCAGAGGA | 6575 |
| Rnf2 | GGAGCTCGGGAAATACAACA | 6576 |
| Rnf6 | GACTCTGAGCTTCGCGCCTC | 6577 |
| Rnf6 | GGACACTGAAATACGAGAAG | 6578 |
| Rnf6 | GTGTTTAACATGTCCCTGGA | 6579 |
| Rnf6 | GTTGCTGCTCGGAGTCGACC | 6580 |
| Rnf6 | GAGCTATGTGATGGAGACAG | 6581 |
| Rnf6 | GGCATTTCCAAAGGGRGGAA | 6582 |
| Rnf6 | GGAGAGGAGGACGTGCTAGG | 6583 |
| Rnf6 | GTTTCTGCCTGTGCCCGGTT | 6584 |
| Rnf6 | GTTCCGCATCTGCTGTGCGC | 6585 |
| Rnps1 | GATTGTGAGAACTGAATCTT | 6586 |
| Rnps1 | GGATCTAAGGCACCCTGCTG | 6587 |
| Rnps1 | GTGTTGGCAAAGTCGGGAGG | 6588 |
| Rnps1 | GGACAGCAACTGTGTGTGGG | 6589 |
| Rnps1 | GTCAGAGGTGAGAAGCGGGA | 6590 |
| Rnps1 | GCGCGCGATGATTGGCTGAC | 6591 |
| Rnpsl | GCCTACCGGATCTGTGTGGA | 6592 |
| Rnps1 | GACTTCAGCCGTTCTTCGTA | 6593 |
| Rnps1 | GGAGCATAGAGTACTTACCA | 6594 |
| Rora | GAGACTGTAGCTTCCTCAGA | 6595 |
| Rora | GTTGGCTAATCTCAGCCAAG | 6596 |
| Rora | GAGATAAAGTCTGCTCCCTT | 6597 |
| Rora | GACGTTATTAATACCTCTCC | 6598 |
| Rora | GAATTTCAAGACTACTTACC | 6599 |
| Rora | GAAAGATCCCAGAGAAGGGT | 6600 |
| Rora | GCCTTGTGTAGCTCCCGGTC | 6601 |
| Rora | GAGTCAGAAGTCTGGCGGGC | 6602 |
| Rora | GAGGTGGAGAAGAGGGAGGC | 6603 |
| Rora | GAAGCTGACTGACAACCCTC | 6604 |
| Rorc | GTCAGAGATGACCTAGTCAG | 6605 |
| Rorc | GAATATTGGATGCCTCAGTT | 6606 |
| Rorc | GCGACTCTCAAGCCAGGACC | 6607 |
| Rorc | GAACAAATAGTTGAAGCTGT | 6608 |
| Rorc | GAATGGAATGCTGGGAGCGA | 6609 |
| Rorc | GAAGAGCAAATTGAGAGGTG | 6610 |
| Rorc | GTTGGGTAAGCAGGAAAGCC | 6611 |
| Rorc | GGCACAGCTAATCAAACTCT | 6612 |
| Rorc | GATATACTTCCCTGCAGCTT | 6613 |
| Rorc | GCAGAAGAGAGCAACTGCAC | 6614 |
| Runx1 | GCAGCTGGGACTCTACCGAG | 6615 |
| Runx1 | GGGTCGATCTTGTGAGTTTG | 6616 |
| Runx1 | GAAGTCCAAGCAAGACTGCA | 6617 |
| Runxl | GCACAGAGACTTGAATAATG | 6618 |
| Runx1 | GAGCACAGATGAAAGTGGAG | 6619 |
| Runx1 | GTTTGCATAGAGGAGACCGA | 6620 |
| Runx1 | GAATCCCACCCTGTCCTCCC | 6621 |
| Runx1 | GGATCTCTCCAAGGCAGAGC | 6622 |
| Runx1 | GCAGCTACAGGCTTGGATCC | 6623 |
| Runx1 | GTGAGCCCTGCAGTCTTGCT | 6624 |
| Runx2 | GATAGTGTCGATAGTGGGAG | 6625 |
| Runx2 | GTAAGTGGTGCAAGCAGAAA | 6626 |
| Runx2 | GTACAAGGAATCGCAGCACT | 6627 |
| Runx2 | GAGGGAGACTGAGTGGCTCA | 6628 |
| Runx2 | GCGCTAGGGAGGGTCATGAC | 6629 |
| Runx2 | GCGAGGATACAAGTTAGTTT | 6630 |
| Runx2 | GCTCAGAATTTGAGGCTGGT | 6631 |
| Runx2 | GGCGGATTTCCCGGCTTCTG | 6632 |
| Runx2 | GGAAGTCGGGTGGGAGATGT | 6633 |
| Runx2 | GCGGATTTCCCGGCTTCTGT | 6634 |
| Runx3 | GCAGCTCAGGACCAGAGGTT | 6635 |
| Runx3 | GATGTCTGCCCAGGTCGCAG | 6636 |
| Runx3 | GAAACAGCCACTGCTGGGAG | 6637 |
| Runx3 | GAAACAGCCTCTGGACCAGA | 6638 |
| Runx3 | GCTATAACCCTCGGAAGACG | 6639 |
| Runx3 | GTTGACCATCACTAGGCCTT | 6640 |
| Runx3 | GGTGTCAGGGTAGTGGTAGA | 6641 |
| Runx3 | GGCCTGGCCTTGTGGTTCTG | 6642 |
| Runx3 | GGCGGCGCCTTTCTGTTGAA | 6643 |
| Runx3 | GGTGAGAAGTTAGAAAGTGG | 6644 |
| Rxra | GCTGAAGACTGTAGTCAGGC | 6645 |
| Rxra | GGTTTGAACTCAGTGCGAGA | 6646 |
| Rxra | GAGCTAAAGCACCATCAACA | 6647 |
| Rsra | GAGGAGATCAAGGTCCTATG | 6648 |
| Rxra | GGGTACCCACGTTAACACGA | 6649 |
| Rxra | GATTAGGGTTCAGGGATTCC | 6650 |
| Rxra | GGTGTGTCATCCTGACTCAA | 6651 |
| Rxra | GCCACTATGACCCTAGAAAT | 6652 |
| Rxra | GAGTTGTTAGGGCTGACTGC | 6653 |
| Rxra | GACTGCAGAAGCCTTGGATC | 6654 |
| Rxrb | GGGACTGGTGTGCTGGGAAA | 6655 |
| Rxrb | GATTGTCGCCTTCCTCGTGG | 6656 |
| Rxrb | GCCATGTTGGTAAAGGTATC | 6657 |
| Rxrb | GGGACTGGTTCTTAATCGGT | 6658 |
| Rxrb | GCAGTGGACAGTGACGTGGC | 6659 |
| Rxrb | GACTCTCAATCTACCTATTC | 6660 |
| Rxrb | GCCGCCATCTTTGTACAGAC | 6661 |
| Rxrb | GACGGTGGGAGTCTAGGAAA | 6662 |
| Rxrb | GGCCGCCATCTTTGTACAGA | 6663 |
| Rxrg | GACACAGGGACTAGCAGGCT | 6664 |
| Rxrg | GAGTTCTCTGATATGGCCTT | 6665 |
| Rxrg | GGCATAGTGCAGCTCGCCAG | 6666 |
| Rxrg | GTAACAAGGGCCAATGTCAC | 6667 |
| Rxrg | GTTGCTAGTTTGATTAACTC | 6668 |
| Rxrg | GGACTAGAGAGGCCATTCCA | 6669 |
| Rxrg | GAGTTGGTTGGCTCTAACCA | 6670 |
| Rxrg | GGCATACGGCCCAGGAATAG | 6671 |
| Rxrg | GCTCCTTTAGCCTAAGACAC | 6672 |
| Rxrg | GTTATTTGATCTGTGAAAGG | 6673 |
| Sall1 | GGGTGCTCAAACTGCACAGA | 6674 |
| Sall1 | GGGACACAGCCAGAGCGCTT | 6675 |
| Sall1 | GGAAACCCTGTCTTGCCGCG | 6676 |
| Sall1 | GTTCCAAGGCTCTGCTGTGA | 6677 |
| Sall1 | GAATTGGTCTTTATTGTTGG | 6678 |
| Sall1 | GGTGGCGATACATCAATTAC | 6679 |
| Sall1 | GCTGATTGCTGGAGAAGTGA | 6680 |
| Sall1 | GACATGGGTCCTGAGTTCCA | 6681 |
| Sebox | GGAACTGGCATGGTGTGCCA | 6682 |
| Sebox | GCCTCTGGAGGGAAGAGGCT | 6683 |
| Sebox | GCCTAACACAGCAGAAGGAG | 6684 |
| Sebox | GGGACTGAGTTGTGTGTCTT | 6685 |
| Sebox | GTACTCAGGGTGGAGGAGAA | 6686 |
| Sebox | GTTAGGCAAAGTCCAAGGTA | 6687 |
| Sebox | GTCTATTTCTTCTCTGGAGG | 6688 |
| Sebox | GGCCTTCCTAGTTAACTTCA | 6689 |
| Sebox | GCACTTTGCCTTGCTTCAGC | 6690 |
| Sebox | GGAAGAATTTCACAAAGTAC | 6691 |
| Setdb1 | GGGAAACAGCGTGAGGAGGC | 6692 |
| Setdb1 | GAAGACAGTGTACTTGAGTT | 6693 |
| Setdb1 | GCAAACTGAAGGAGAGACGG | 6694 |
| Setdb1 | GCAGCGCTATGCAATAAATT | 6695 |
| Setdb1 | GCCAAACCCAGGCAAACTGA | 6696 |
| Setdb1 | GTCTCTCCTTCAGTTTGCCT | 6697 |
| Setdb1 | GAGACTGTGGTACACCTCTG | 6698 |
| Setdb1 | GTAGGGCATTTCCAGATAAG | 6699 |
| Setdb1 | GGAGTTTACTTACACAGCAG | 6700 |
| Shh | GGTTCAGCTATTCCTCCTGC | 6701 |
| Shh | GACCAAGTACAGATTCTTAG | 6702 |
| Shh | GGCGAACTATTTATGTGGAA | 6703 |
| Shh | GCATTTCTGCAACCTGGAAC | 6704 |
| Shh | GGAAGCAGGACTAGGCTCTT | 6705 |
| Shh | GAAATTCTGCAGTCTCCAGT | 6706 |
| Shh | GGGATGTACACAGAGGATAC | 6707 |
| Shh | GCAAGCTGTCCCTGGGTACG | 6708 |
| Shh | GCCTCTGGGAGTTAAATGGC | 6709 |
| Shh | GGTAAAGGIGGGTGGGAGGG | 6710 |
| Shox2 | GCAGGGTGCAGGGAGTTGTT | 6711 |
| Shox2 | GCATTGCAATCAGAGTCAGT | 6712 |
| Shox2 | GCAGCGGCTTGGAGCAAGAA | 6713 |
| Shox2 | GGGTCTCCTGATCTCTTACC | 6714 |
| Shox2 | GAACTGGATAGACTTCTCGG | 6715 |
| Shox2 | GATGGCGAGGAAGGGAATGG | 6716 |
| Shox2 | GGGAAATGTTTCTAGAAGGA | 6717 |
| Shox2 | GATGCTAAATAATTAAGGGC | 6718 |
| Shox2 | GATCCAGGCTGGAGTCCACC | 6719 |
| Shox2 | GGGATGGCGAGGAAGGGAAT | 6720 |
| Sin3a | GAGGTTCCAGCCACTAGCCT | 6721 |
| Sin3a | GCCAAGCCAAGCCCTGTTCC | 6722 |
| Sin3a | GAAGGATGCTAAAGGCTGGA | 6723 |
| Sin3a | GTAAATCTCTTCCTAGTTCA | 6724 |
| Sin3a | GAGGCAGCTCCATGTTTGCG | 6725 |
| Sin3a | GTTACTAGATGAAAGAGGGT | 6726 |
| Sin3a | GCTCCGCGCCCTTAGTTAGG | 6727 |
| Sin3a | GTAGATGAGGTTTACATTTG | 6728 |
| Sin3a | GTGATTGGCTAAACCATTGA | 6729 |
| Sin3a | GACTGAACCTCAGCCTTCCA | 6730 |
| Sin3b | GTGCAAGAATTCAGTCCACA | 6731 |
| Sin3b | GTGGTCAAGGTAGACACCTA | 6732 |
| Sin3b | GGAGACTCGTGGCGTCAAAT | 6733 |
| Sin3b | GTCACTCTGAGAGGAGTTAA | 6734 |
| Sin3b | GCTTTCTGGGACAAGGACTT | 6735 |
| Sin3b | GGAAGGAGAGTATACCAGGT | 6736 |
| Sin3b | GCTTGCTCTAAGCAAGCAGG | 6737 |
| Sin3b | GACAGAATCCTAGAGCAAGG | 6738 |
| Sin3b | GGTTTGCACACATTTGTGAA | 6739 |
| Six1 | GAAGCTACCGAGTGCTGCCT | 6740 |
| Six1 | GGAGAGGTGGGAAGTGAGGT | 6741 |
| Six1 | GCAAGTAGGTCCCAGATACA | 6742 |
| Six1 | GTGCTGCCTAGGATAAGAAG | 6743 |
| Six1 | GTGACACGTGGGAAGAGGAG | 6744 |
| Six1 | GGCTACTTACAATCTCTCCA | 6745 |
| Six1 | GTATAACTCACAGATAAGGA | 6746 |
| Six1 | GTGGAGATAAGGGAAGGTGG | 6747 |
| Six1 | GTCTCTATGCTACAGTGCCA | 6748 |
| Six2 | GGCAGTCTGCGGGTCTATGC | 6749 |
| Six2 | GTCTGTGCCTCCTTGGATCT | 6750 |
| Six2 | GAGGCCCTAGGCAGGATTGG | 6751 |
| Six2 | GTCCTGCCAATGCTGACAGT | 6752 |
| Six2 | GGGTAATTGTCGCACTTCCC | 6753 |
| Six2 | GTGGACTTCCTCTGTGGGTA | 6754 |
| Six2 | GGTGCAAATTCTGGGAAGGA | 6755 |
| Six2 | GAGCAGCTGCTTAAGAGGCC | 6756 |
| Six2 | GGCCTTAGAAAGTGGGTAGG | 6757 |
| Six2 | GAGCATAGGCTGTCTGGGTA | 6758 |
| Six3 | GTTTCAATACGCGTTGTACA | 5759 |
| Six3 | GGGTTTAAGGAGGAGCCGAG | 6760 |
| Six3 | GGCCAGAAACCTAGGGACTC | 6761 |
| Six3 | GATGACTTGCGACTAACTTC | 6762 |
| Six3 | GGGCCTAAACTCGCTGACCA | 6763 |
| Six3 | GGCTAAGATTAACAAGCAGG | 6764 |
| Six3 | GAGCACAATTTCCCAGGCAA | 6765 |
| Six3 | GGGAGGCAGCATAGGGCTTC | 6766 |
| Six3 | GTCACCGTAGCAAGCTGCTG | 6767 |
| Six3 | GAGATTCTCAATCTCCAATG | 6768 |
| Six4 | GGTGTGGTGGGAAGAGCAAG | 6769 |
| Six4 | GCAACCGGAGGAGTCACGTT | 6770 |
| Six4 | GGTCTTAGCTCAGAGAGGGA | 6771 |
| Six4 | GTTCCTAGTAGATTCAAACA | 6772 |
| Six4 | GGGTTGAGGCTGAAGGGAGG | 6773 |
| Six4 | GTAGCCCACCGAGATGACAA | 6774 |
| Six4 | GAAAGGCCCAGTGATTCCCA | 6775 |
| Six4 | GATCTTGAAGAGTGGAAGAG | 6776 |
| Six4 | GAGCTAAATTATAATGGACT | 6777 |
| Six5 | GCCCATCTATGGGTATAGGC | 6778 |
| Six5 | GACCCAGGCTCACAGAAGTG | 6779 |
| Six5 | GGTCCGAAACCGAGACCTGG | 6780 |
| Six5 | GTTTAGGGTCCATTCTCCTT | 6781 |
| Six5 | GGGTAGGCGGTGGATCTAGC | 6782 |
| Six5 | GGTGAGAACCTCTTCTTCCA | 6783 |
| Six5 | GGCGCATGTTCGGCAGCTAC | 6784 |
| Six5 | GGATCTGCAGGAGAGAAGGT | 6785 |
| Six5 | GTGGGTAGCATATCTAAGAT | 6786 |
| Six5 | GACAGACCCGAGTGCAGAGC | 6787 |
| Six6 | GTTCATCCCTGAATTGGACT | 6788 |
| Six6 | GGGAGGTGCTGAAACGACCG | 6789 |
| Six6 | GAAATGATAGGAATGGTTGC | 6790 |
| Six6 | GTTGGTAGAAAGGAAACACT | 6791 |
| Six6 | GACTTGCTTACAAAGGTTAA | 6792 |
| Six6 | GGCAGAGCTTGGCAGAGTGA | 6793 |
| Six6 | GCAGCATCCTACCTCTCTGG | 6794 |
| Six6 | GATTCTCCCTCTCCCTCAAG | 6795 |
| Six6 | GGGCTTATTAGTTGGTAGAA | 6796 |
| Six6 | GAGTGAGGGCCCTAGAGGAA | 6797 |
| Smad1 | GTGTATGGCCATACCCTCCC | 6798 |
| Smad1 | GAGGTGTCCAGGATGGCACT | 6799 |
| Smad1 | GAGGATCCCTAAGCGGCAGC | 6800 |
| Smad1 | GCCTGGCTTAAAGCCACTCA | 6801 |
| Smad1 | GTCTCTGGGAAGGGCTGTCC | 6802 |
| Smad1 | GTTTCTTGTTTAAGICCTGA | 6803 |
| Smad1 | GCCCTGAGTGGCTTTAAGCC | 6804 |
| Smad1 | GAAGGCGCGGGCCGGTAATT | 6805 |
| Smad1 | GCTCATAGTAGACAAAGCCA | 6806 |
| Smadl | GCTCATGCTACATGAAGGGC | 6807 |
| Smad2 | GGTGGGTAATAGATGATTCT | 6808 |
| Smad2 | GTGCGGTTGGTATTAGGGCT | 6809 |
| Smad2 | GTCTCCAGGAACATTGAAAT | 6810 |
| Smad2 | GTTTCTCCAGCCCGAGCCGT | 6811 |
| Smad2 | GAGCTCAAAGTCTGACACTT | 6812 |
| Smad2 | GGAAGTAGGCTGGAAACAGT | 6813 |
| Smad2 | GATGAAGAAGCTTGGAGGGT | 6814 |
| Smad2 | GGTGACCCGGTACCTTTAGT | 6815 |
| Smad2 | GGATGAAGAAGCTTGGAGGG | 6816 |
| Smad2 | GTAGTGCTAGTGAGGCTTGC | 6817 |
| Smad3 | GGGAGAGAATTAACATTTCA | 6818 |
| Smad3 | GGAGGGCAGAGGACAGAAAG | 6819 |
| Smad3 | GCTGAGGTCTACTGAGCCTC | 6820 |
| Smad3 | GGCCATACCCAAAGAAACCT | 6821 |
| Smad3 | GTCTCTAGCAGCAAGTGGAA | 6822 |
| Smad3 | GCTTGGTTCACTGGGCCCAA | 6823 |
| Smad3 | GTGGCCAGAGCTGCTTTAGG | 6824 |
| Smad3 | GCAAGCAGGGCTGGGATCAT | 6825 |
| Smad3 | GGAGTGCAGCCAGCCCTTGA | 6826 |
| Smad3 | GGGATGAAGGTTTGCTTAGG | 6827 |
| Smad4 | GGACCACAGGGCATGAACAC | 6828 |
| Smad4 | GACAGCTCGGGATGAGCGAT | 6829 |
| Smad4 | GCTAAATAGGTTGTGCAGGC | 6830 |
| Smad4 | GGACACAGCTGGACCGAGTG | 6831 |
| Smad4 | GACCACATCCGGGTAATTTC | 6832 |
| Smad4 | GGCCAAACCCTGAAATTACC | 6833 |
| Smad4 | GTCAGCTAGAGGTCCTCCCA | 6834 |
| Smad4 | GGGAATGAGTCTTCTTTCCT | 6835 |
| Smad4 | GAGAAAGGAGCGCTGCGGGA | 6836 |
| Smad5 | GCGAGCCTGGAAGTGGCACT | 6837 |
| Smad5 | GCAAGACTTCTTTATGCCTC | 6838 |
| Smad5 | GGAATTACACTCCGGCCAGC | 6839 |
| Smad5 | GTCCAAGCTGACCGTTTGGA | 6840 |
| Smad5 | GAGATTAAATAAATGCCGTG | 6841 |
| Smad5 | GGAAATGTAATCAAGTACAA | 6842 |
| Smad5 | GGCATAAAGAAGTCTTGCTT | 6843 |
| Smad5 | GTTTCCTGGCTGACAACTGC | 6844 |
| Smad5 | GGGAGTTGTAAATCCATGCC | 6845 |
| Smad5 | GGTGCTCGAGCTGTCTTACA | 6846 |
| Smad6 | GGCATAAGGTAAATCCTCGA | 6847 |
| Smad6 | GCATCCAATTCAGGTTGTCA | 6848 |
| Smad6 | GTGAATATGAGTAGCTGTCC | 6849 |
| Smad6 | GAAGCCTGCTACCTTAAGCT | 6850 |
| Smad6 | GGCCTTGGCACTCTATATAA | 6851 |
| Smad6 | GTGGGTTCACCCAGCAGAGC | 6852 |
| Smad6 | GAATTTCTTTCATTGAGCTC | 6853 |
| Smad6 | GTGGTGTGCAAGTCCAGGAA | 6854 |
| Smad6 | GTGTTTGTTAGCGCGTGTGC | 6855 |
| Smad7 | GTCTAAATCGGGCCACTAAC | 6856 |
| Smad7 | GAGGGCACAGGCTAGTGTGG | 6857 |
| Smad7 | GACAGCAGTCAAGAAGACCA | 6858 |
| Smad7 | GCAGCATCCTGGAGGGAGGA | 6859 |
| Smad7 | GACATTTACACCGGCCAGGA | 6860 |
| Smad7 | GCTGGTGCTTTATGGTTCCC | 6861 |
| Smad7 | GGCGACAGCAGCAACAGCAG | 6862 |
| Smad7 | GTGTGTCTTGTGCACAGCTC | 6863 |
| Smad7 | GACACACATTTAGAGGGCTG | 6864 |
| Smad7 | GCAGTCAAGAAGACCAAGGA | 6865 |
| Smarca4 | GCTACTGCCTCTTAAACGCT | 6866 |
| Smarca4 | GAACTGAGCTGTGTGTGTTG | 6867 |
| Smarca4 | GAGGCATGAATCTACAGATT | 6868 |
| Smarca4 | GCTAATTACTGGGCCTCAGC | 6869 |
| Smarca4 | GTTCTGCAGGAAATGTGGCC | 6870 |
| Smarca4 | GCACGCGTACTAGTCCTTTG | 6871 |
| Smarca4 | GAGTTGCCCACTCAATAGAC | 6872 |
| Smarca4 | GTTCTATGCTCCAAGGCTAA | 6873 |
| Smarca4 | GAAATTAAAGTCCTCAGGCT | 6874 |
| Smarca4 | GGTCCAGATGGGAGATAGTA | 6875 |
| Snai1 | GTGTTGGAACGTTCACAGGG | 6876 |
| Snail | GGAGGCAGAGCTAGAAACTT | 6877 |
| Snai1 | GGCAGAGGTAGCAAGGACCA | 6878 |
| Snai1 | GCTGTATGGTCTTCTATTGT | 6879 |
| Snai1 | GCTGGCATGCCGCTTAGGAA | 6880 |
| Snai1 | GGGAGGTGTGATTTGATGAA | 6881 |
| Snai1 | GAACAGGCTTTCCTACCACG | 6882 |
| Snai1 | GCAGGTGTGAGGTTGTGAAC | 6883 |
| Snai1 | GCTGCTGACCTTTGGGCGCT | 6884 |
| Snai3 | GATGCAGTCTGTTTATGCCT | 6885 |
| Snai3 | GGAACTGGCCAGCGATCCCT | 6886 |
| Snai3 | GCCTGAGTGGTTAGCAACGA | 6887 |
| Snai3 | GTCTGGTGGGACAGTCTCTG | 6888 |
| Snai3 | GGGATCTCCAATTTCCTTCA | 6889 |
| Snai3 | GGAACTGCCAGTTTCATGAA | 6890 |
| Snai3 | GATGACATCCIGAAAGCATT | 6891 |
| Snai3 | GGCAGCGTAGGAGACAGTGG | 6892 |
| Snai3 | GAACTCTGCTCTTTCATCCA | 6893 |
| Snai3 | GCTCAGAATGAGGGTGGAGG | 6894 |
| Sox1 | GAAACCCAGCAGAGGTACTT | 6895 |
| Sox1 | GCAGAATAACAGCGGTGCGG | 6896 |
| Sox1 | GGCACAGAGTTGGCTGGCTG | 6897 |
| Sox1 | GAGGAAGAAAGAATCGCTGT | 6898 |
| Sox1 | GCTGACTTGCCCTAACACAG | 6899 |
| Sox1 | GAACTCGGGTTTGCGAGGGT | 6900 |
| Sox1 | GCTCCGAATGATTAACGATT | 6901 |
| Sox1 | GAATCTGTAAAGGCCTTTGC | 6902 |
| Sox1 | GAAGAACTTGTAGACTCTAA | 6903 |
| Sox1 | GTGCTTCGGGAGGTTGCTGG | 6904 |
| Sox10 | GTTGAGTGGCTAGGCGGAAC | 6905 |
| Sox10 | GGGTGTGAGTGTGTGTGTGG | 6906 |
| Sox10 | GTCCTTACCCGGTCCTAATG | 6907 |
| Sox10 | GGCATAGAGGAGTGCTGTGG | 6908 |
| Sox10 | GACACACTGGCCCAATTGTC | 6909 |
| Sox10 | GCCAAACCCAAGCTGAGTCC | 6910 |
| Sox10 | GTGTCTCTCACTTCCATGAA | 6911 |
| Sox10 | GAGATAGTCACATAGGGCAA | 6912 |
| Sox10 | GAGACACAGGAGGCTGAGGC | 6913 |
| Sox10 | GTTGTATGTGTACAGGGCAA | 6914 |
| Sox11 | GGCCTATGGAGTAGAAAGTG | 6915 |
| Sox11 | GAAAGAGGATCCCAAATAAG | 6916 |
| Sox11 | GCGGTTCGGAAAGGAGTTCA | 6917 |
| Sox11 | GACCGTTACTCCAGCCGAAC | 6918 |
| Sox11 | GGTTTCAGGACCGAGCTGCA | 6919 |
| Sox11 | GTGCAGTACACCAACCTGAA | 6920 |
| Sox11 | GGAAAGGAGTTCACGGATTC | 6921 |
| Sox11 | GTCGAAGCGCCACCTTCTGC | 6922 |
| Sox11 | GCGACCGGGCTCTAGAAAGA | 6923 |
| Sox12 | GGATGCTAGAGCCTGGGTGT | 6924 |
| Sox12 | GAGGTCACCTTCATGGCGCC | 6925 |
| Sox12 | GAGTGATCTGGAAGGCAGGC | 6926 |
| Sox12 | GCTGCACCTGGAGTTGAGTG | 6927 |
| Sox12 | GTCTCTTACTGGGACACTGA | 6928 |
| Sox12 | GATCCGGGCTGGAGTGAAGT | 6929 |
| Sox12 | GAGCCAGTTGTAGCACCGCC | 6930 |
| Sox12 | GCTGTTAGCATGGATTTCCA | 6931 |
| Sox12 | GCTGGACCCTGTGTGTAGTA | 6932 |
| Sox12 | GACCGCCAGACTAGCTAGAA | 6933 |
| Sox13 | GTCCTAAAGCAGGCTTGTGT | 6934 |
| Sox13 | GACACACGATTGCCACGTAT | 6935 |
| Sox13 | GTGATCCCTGGCATCTGcTT | 6936 |
| Sox13 | GCCAGGTCCTTGTGTGCTAC | 6937 |
| Sox13 | GGTGCACAGACATGCTGTCT | 6938 |
| Sox13 | GGGCTGGGAGGTGCTTTGTT | 6939 |
| Sox13 | GACACAGTGGCAGCCCTTTC | 6940 |
| Sox13 | GTACACTTCAGTTCCCAGGC | 6941 |
| Sox13 | GCTCGTACACTTCAGTTCCC | 6942 |
| Sox14 | GGGTCCAGGGAATGAGGTCT | 6943 |
| Sox14 | GGAGTGTGTTCCAGACTTAT | 6944 |
| Sox14 | GGCCGATGCGAAATGCCCTT | 6945 |
| Sox14 | GGACGTAACACAACTCGTGC | 6946 |
| Sox14 | GGTGCACAGTCTGCATTTGA | 6947 |
| Sox14 | GTGAAGAGTCCTAGTGGCAA | 6948 |
| Sox14 | GCGAAGTTCAAAGGCGAGGT | 6949 |
| Sox14 | GeCGCCTCCACCTGTAATCC | 6950 |
| Sox14 | GAGCTCTGGGCTTGCTGGCT | 6951 |
| Sox14 | GCTTCATGCGGGCTTCGCAG | 6952 |
| Sox15 | GTAGGGTGGACAAGAGGGAG | 6953 |
| Sox15 | GGCAGGTTGTATTTCTGGCC | 6954 |
| Sox15 | GGCCTCCGGTGGAACGTTAG | 6955 |
| Sox15 | GGAGCTGCTCTTATCTACGG | 6956 |
| Sox15 | GCTGGAGCTGCTCTTATCTA | 6997 |
| Sox15 | GCCTCCGGTGGAACGTTAGG | 6958 |
| Sox15 | GAGTTGGGTAGTTTGGTGAA | 6959 |
| Sox15 | GAACACTACCTCTCCGGTAA | 6960 |
| Sox15 | GGGTAGGGTGGACAAGAGGG | 6961 |
| Sox15 | GGATTCTCTTTCAGGACAGA | 6962 |
| Sox17 | GTCCTACCCAGTTTGCTCTC | 6963 |
| sox17 | GAGTCAGTAGTGATGGATTA | 6964 |
| Sox17 | GGTACATCCTTGGAATGTTA | 6965 |
| Sox17 | GGACTTGAATGTCCTTTAAC | 6966 |
| Sox17 | GTTTACTTCCTGCTTCGCCG | 6967 |
| Sox17 | GAGTCGCCAGCTGCTAGGGT | 6968 |
| Sox17 | GTCGATTGGCACCTTTCACC | 6969 |
| Sox17 | GGAGAGCAAGTTCATGAGGG | 6970 |
| Sox17 | GAGACAAATTGGAATTTACA | 6971 |
| Sox17 | GGCTCATTCCGCACACCGTT | 6972 |
| Sox18 | GTCCTGAAAGCATTTCACCT | 6973 |
| Sox18 | GAACAACTGGTACAGGAGGA | 6974 |
| Sox18 | GTTTCTGAACACTCTTGCCA | 6975 |
| Sox18 | GCTCTGGTGGCTGGATTTGG | 6976 |
| Sox18 | GCCCTACCATTCCAACTTTC | 6977 |
| Sox18 | GTCCCATCTGGAAGGAGGGT | 6978 |
| Sox18 | GGAATTCTGGGATCTCTCCA | 6979 |
| Sox18 | GAATAGGGTGCTGAACCAGA | 6980 |
| Sox18 | GCTACTTCCCTGGCTAAGTC | 6981 |
| Sox18 | GCTCCTCAGACTAAAGGATG | 6982 |
| Sox2 | GTGACAATAACAGCCAAGCC | 6983 |
| Sox2 | GCTGGCGACAAGGTTGGAAG | 6984 |
| Sox2 | GGCTGTGGGAGAATGGGCTG | 6985 |
| Sox2 | GGAAAGAAGCTCCCGAGTGC | 6986 |
| Sox2 | GACTGTCCAACTAGTATTTC | 6987 |
| Sox2 | GCCTTTGCACCCTTTGGATG | 6988 |
| Sox2 | GGCAGTTTCAGAGGAAACCT | 6989 |
| Sox2 | GGGTTGGGAGTTAGAAAGAG | 6990 |
| Sox2 | GATAAACAGGGCAGTTTGTA | 6991 |
| Sox2 | GCAGCCACATCTCAGAAACT | 6992 |
| Sox21 | GAGTCACACCTGGCCCTCCA | 6993 |
| Sox21 | GGCCTCAGTGGAGACTGTCC | 6994 |
| Sox21 | GTAGGTTATAGGAAAGGGAA | 6995 |
| Sox21 | GTGGATCCCACCATGAGGCT | 6996 |
| Sox21 | GGAAAGGAGAGCAATTATGA | 6997 |
| Sox21 | GCGAGGAAGAGGGTTGAGCC | 6998 |
| Sox21 | GAAGCTTTCGGGACTGGGAA | 6999 |
| Sox21 | GCTATATCACCTGAGATCGC | 7000 |
| Sox21 | GTGGGATCCACGTGGAATCG | 7001 |
| Sox3 | GACAAACAGCTAATCTGCTT | 7002 |
| Sox3 | GGAGCGGGTTTAGGATGCAA | 7003 |
| Sox3 | GGGCTCGGTGTTGATTGGCC | 7004 |
| Sox3 | GTCACCGCAGAGAAGCCAAG | 7005 |
| Sox3 | GAGACAGAAGCCGGGAGTAC | 7006 |
| Sox3 | GCCATGCCACTTGCTTGAGC | 7007 |
| Sox3 | GGTGTCTTAGTCTTCAGTGC | 7008 |
| Sox3 | GGTCTGCGCCCTGCAAACGT | 7009 |
| Sox3 | GAGCTTTCCAGGTGGGCCAT | 7010 |
| Sox4 | GATGTTCGAGAGACTAAGGT | 7011 |
| Sox4 | GAGTGTGTGATTATAAACCA | 7012 |
| Sox4 | GTCACACATTCAGAGTATTT | 7013 |
| Sox4 | GCTCTTTGAGACAAGGACTT | 7014 |
| Sox4 | GCATCGGGTTCCAAGCCAAT | 7015 |
| Sox4 | GTCTATGTTTCTCTTAGACC | 7016 |
| Sox4 | GCACGATGTTCGAGAGACTA | 7017 |
| Sox4 | GACAATGGGTAAGAAAGAGA | 7018 |
| Sox4 | GTAATAGTATATGCCATCAA | 7019 |
| SoX5 | GGACCTAATCAAACTGCGGT | 7020 |
| Sox5 | GGTAAAGCGAATCATAGGAG | 7021 |
| Sox5 | GAGTGTGCGGCTGTGCAGAG | 7022 |
| Sox5 | GCAATCCTGAAGGTCAGCAC | 7023 |
| Sox5 | GCTCACAGCATCTCACCTTA | 7024 |
| Sox5 | GTTAATGCTCACAGTTTGAT | 7025 |
| Sox5 | GTGAGTGACAGCCTGTTTAC | 7026 |
| Sox5 | GGAAGGTGGAAGGAGTGGAG | 7027 |
| Sox5 | GGACTGGTCAGGCCATCTTC | 7028 |
| Sox5 | GGTCAGGCCATCTTCTGGTT | 7029 |
| Sox6 | GTGTTACATACCTCTGAGTT | 7030 |
| Sox6 | GGAGTGGGAGAAATGGGCTC | 7031 |
| Sox6 | GCCTACAAGAAACTGTATAC | 7032 |
| Sox6 | GGCCCTTGTAGATGGATCGT | 7033 |
| Sox6 | GAAACAGCTGGGCTGCACAC | 7034 |
| Sox6 | GTTGTGCCTTACTCCGGAGG | 7035 |
| Sox6 | GCCACTACGACCCATCATGC | 7036 |
| Sox6 | GATCAGCTCATCTATAGCTG | 7037 |
| Sox6 | GCTATTTAGCTGAGAACTCT | 7038 |
| Sox6 | GGTGGCAAGGGTACTTGGGT | 7039 |
| Sox7 | GCCATCTGTAGGCTGGAACC | 7040 |
| Sox7 | GGACGACAATGGATCACAAG | 7041 |
| Sox7 | GGCCCTTATTTATCAGCTTC | 7042 |
| Sox7 | GTGGCTGCCCACGTTTACTG | 7043 |
| Sox7 | GAGAGGCCAGCGCCTGTTTG | 7044 |
| Sox7 | GTGAGATCAGCCTTATCGCC | 7045 |
| Sox7 | GGAAAGGTCTTGGGAGATAC | 7046 |
| Sox7 | GCTTTCTGAGAAAGAGGAAC | 7047 |
| Sox7 | GATAAGGCTGATCTCACAGG | 7048 |
| Sox7 | GCAGCGATCACCGGCTTTAA | 7049 |
| Sox8 | GAGTTACCAGGGTCACCTGG | 2050 |
| Sox8 | GGAATGCCCAATACAAACTC | 7051 |
| Sox8 | GCTAGAAAGAACGTTATTCA | 7052 |
| Sox8 | GTCTGGGTGGCATAGAGCTG | 7053 |
| Sox8 | GGCTGAGGATGTGAACCAAT | 7054 |
| Sox8 | GAAAGAACGTTATTCAGGGT | 7055 |
| Sox8 | GCTAGACAGAGGTGGGAGGG | 7056 |
| Sox8 | GTCCTTCCGGGTATGACCTG | 7057 |
| Sox8 | GTTCTCTGGGCAGCTCTTCC | 7058 |
| Sox8 | GGAGAAGCAGGCCAAGGCTG | 7059 |
| Sox9 | GGACAGACTTGGCCTGATCT | 7060 |
| Sox9 | GCTGGCATTTCTTCCAGAAC | 7061 |
| Sox9 | GGTTGGGTGACGAGACAGGA | 7062 |
| Sox9 | GTAGACGCACTTCTATGTTC | 7063 |
| Sox9 | GTCCACACTTAGCAAATTAG | 7064 |
| Sox9 | GGAGTGGACTTTACCTGTTC | 7065 |
| Sox9 | GAGGGCGAAGTTTGCAAAGG | 7066 |
| Sox9 | GCACACAGGTGGGCGTTCTG | 7067 |
| Sox9 | GTCCTCTTAGACCTGCACAC | 7068 |
| Sox9 | GAGGATTGTGGCTCCGGGTT | 7069 |
| Sp1 | GTGCTAAATGCCTATTTAAC | 7070 |
| Sp1 | GAGTTGGTTTAGCAGGTCTG | 7071 |
| Sp1 | GTGGAGGCTGGAACTTGGAA | 7072 |
| Sp1 | GTCGCCATGTTGGCCCTCCT | 7073 |
| Sp1 | GCCCAATGAGGGAGGGTGAA | 7074 |
| Sp1 | GGAGAAAGAAGGCGAAATGG | 7075 |
| Sp1 | GCTCCGTGAGCGGTAGGGAT | 7076 |
| Sp1 | GAAATAGGCCGGAATGGGAT | 7077 |
| Sp1 | GGGCCTTGCAGAGGAAAGGC | 7078 |
| Sp100 | GTTCCATTGTCTAGAGTCCT | 7079 |
| Sp100 | GGATGCTTGGATAGTCTGAG | 7080 |
| Sp100 | GGATGGATGACCACTATAAA | 7081 |
| Sp100 | GTTCTGACAAAGTGTAGAAT | 7082 |
| Sp100 | GTAGAGATGGGAGCCGACCT | 7083 |
| Sp100 | GAACTGAAATTGCTGGTGAT | 7084 |
| Sp100 | GAGTGGGTAGAAAGCTCAGG | 7085 |
| Sp100 | GATCTCTTCTGTCTTTCAGA | 7086 |
| Sp100 | GCTACAGCATCGCTTCCTGC | 7087 |
| Sp2 | GGGCTGACTATCCTGCTGGG | 7088 |
| Sp2 | GAGATGTATAAGCTCTTTAC | 7089 |
| Sp2 | GCCCATACATTCTGTTCCCA | 7090 |
| Sp2 | GTCTGAAGCTGAGAGGATCA | 7091 |
| Sp2 | GGAAGCATCTAGAGTGACGT | 7092 |
| Sp2 | GAGCGCATCGCCTTCACCTC | 7093 |
| Sp2 | GCTTGACAGGCACCACAGGT | 7094 |
| Sp2 | GAGAAAGCTAAACCTACCTG | 7095 |
| Sp2 | GAGACACATACATCCCTGCT | 7096 |
| Sp3 | GTGTTTAGGACAGCTCAGGC | 7097 |
| Sp3 | GACTAGCTAGAAACGTTATA | 7098 |
| Sp3 | GTGTCACAGTGACTCAACTG | 7099 |
| Sp3 | GCTGCTGCTACTGAGCAAAC | 7100 |
| Sp3 | GCATTGAGGATGTCAAAGGA | 7101 |
| Sp3 | GCTCTAAGTGCCCGCCTCCA | 7102 |
| Sp3 | GGCAAATGAGAGCCGGGAAG | 7103 |
| Sp3 | GACTTTCTTGGTTAAGAAGC | 7104 |
| Sp4 | GACAACCTTGTGAGACCTCT | 7105 |
| Sp4 | GGAACTCTCCAATTCATGCC | 7106 |
| Sp4 | GAGGAAGGCGGTGCCTCAAT | 7107 |
| Sp4 | GTTGTCTAAAGAGAACCACA | 7108 |
| Sp4 | GAGCTGACCCACATGCAGCC | 7109 |
| Sp4 | GCAAAGAAAGCAGGGCGAAG | 7110 |
| Sp4 | GGCTCGGCTCTCATTGGATG | 7111 |
| Sp4 | GTACTGGTATCCAGGAAACA | 7112 |
| Sp4 | GCGTTCCACATTTATTGACG | 7113 |
| Sp4 | GTGGTCATTGTACTTCACAT | 7114 |
| Sp6 | GGATCTCTGGAAACCAGGAG | 7115 |
| Sp6 | GATGCCATGGAAATCTAACC | 7116 |
| Sp6 | GCAGGAGAGAATAAAGTGAT | 7117 |
| Sp6 | GGTTTATTCTGTTCCTAGCA | 7118 |
| Sp6 | GGTTGGGCGGGCATCTGAAA | 7119 |
| Sp6 | GCGCACTGGGATCAGAGGGT | 7120 |
| Sp6 | GGAAACTGAGGAAGACATTG | 7121 |
| Sp6 | GTGAGGTAGGATGGGCTCCA | 7122 |
| Sp6 | GCTTAGTGCTGGGTGTGGGC | 7123 |
| Sp6 | GCTCTTAACTCAGAAGTGGT | 7124 |
| Spdef | GCCTGATGCCCTCAAAGGCC | 7125 |
| Spdef | GAACGCAACAGATGTGTCCT | 7126 |
| Spdef | GAAGAACAGAGACAAATGGA | 7127 |
| Spdef | GTAGTCAGCCCAGCCTGCTG | 7128 |
| Spdef | GGGAAAGCCACCTGACATTC | 7129 |
| Spdef | GCTTCCTGGAGGTGGTGCAG | 7130 |
| Spdef | GAGGGATGGACAGAGAGGGT | 7131 |
| Spdef | GCCCTCAAAGGCCCGGGAAA | 7132 |
| Spdef | GCCTTCCTGGATGTGTGCTA | 7133 |
| Spdef | GCTGCCCAAATGTGCCTTCC | 7134 |
| Spi1 | GATGCTGGCCTCAGGATGAC | 7135 |
| Spi1 | GAGTTTCTGTTTGTTCTAAG | 7136 |
| Spi1 | GAGTTCCTAGTGAAGGTCCA | 7137 |
| Spi1 | GAGATGTGCAGACAGATTGT | 7138 |
| Spi1 | GGAGGTCTTGGAGCCAGTGG | 7139 |
| Spi1 | GATGCCAGGCTGCATAGCAA | 7140 |
| Spi1 | GAAGGCTGAGAAGCCCAGCT | 7141 |
| Spi1 | GGAGGAAGGAGGGAAGGCTA | 7142 |
| Spi1 | GCCAAACAGACCATGGAACA | 7143 |
| Spi1 | GAAGGGTCAGAGCAAGGCCA | 7144 |
| Spib | GCGCAAGGACCTGGAAGACC | 7145 |
| Spib | GTTCTGTCAGCCACGGGAGT | 7146 |
| Spib | GAGCTACACACTGTATCTGC | 7147 |
| Spib | GGCTGTGCTCCAGCACAAAC | 7148 |
| Spib | GTGTGGTCACCGCCTAGAGG | 7149 |
| Spib | GGCTCAAAGATGCGCAAGAG | 7150 |
| Spib | GTTGCCCTGAGGTGTGCTAG | 7151 |
| Spib | GACTGTGCTCACCAGCAAGG | 7152 |
| Spib | GCTGTATATCAGCTGTCACC | 7153 |
| Spib | GTTAAGTGCAGAGGCGGGAA | 7154 |
| Spz1 | GAGCCTAGGAGAGAAGAGAG | 7155 |
| Spz1 | GTTGTGGGACAGGAATCTAA | 7156 |
| Spz1 | GGCTGTGGTGTCTGAGTTGT | 7157 |
| Spz1 | GCTCTTAGAATGAAGAGCCT | 7158 |
| Spz1 | GGGAGGAGTAAGGTTGGCTG | 7159 |
| Spz1 | GGAAGTGTTGCTCCAGCTGT | 7160 |
| Spz1 | GTCACTCTCATACTCTTTCT | 7161 |
| Spz1 | GGAGGACTGAGGATACAGTT | 7162 |
| Spz1 | GATTCCCAAGTGGAGGACTG | 7163 |
| Spz1 | GACAACTAGGCTCAACGTCA | 7164 |
| Srebf1 | GAGAATGCTGGCCCTAGATG | 7165 |
| Srebf1 | GTTCCTAAGTCACAGGGCCC | 7166 |
| Srebf1 | GAGGACCTGAGCCCAGCTAC | 7167 |
| Srebf1 | GACCTCTGAGTCCTTCTGGC | 7168 |
| Srebf1 | GCTCCACAGATTGGTTTACT | 7169 |
| Srebf1 | GTCTGCAGTGCTTAAAGGGT | 7170 |
| Srebf1 | GCTTCTTCTGTATCAGGCCA | 7171 |
| Srebf1 | GGAACAGGTAAAGCAAGGGA | 7172 |
| Srebf1 | GGACTACTCAACTGCAAGCA | 7173 |
| Srebf1 | GTCCTCTCTGCTCCAATGGT | 7174 |
| Srebf2 | GGACCTAAGTGTATACTGAG | 7175 |
| Srebf2 | GGATGGGATAAGTGTGACTT | 7176 |
| Srebf2 | GAATAACAACCTAGCTCCTG | 7177 |
| Srebf2 | GGAGCTAGGTGCCAGCTGAA | 7178 |
| Srebf2 | GAGGTGTGGGACCAGTGTGG | 7179 |
| Srebf2 | GCTCTCGACAAAGTTGCTCC | 7180 |
| Srebf2 | GTCGAGAGCCCGGAAATAGA | 7181 |
| Srebf2 | GATGGGATAAGTGTGACTTA | 7182 |
| Srebf2 | GACTTGGAAGTTTAGGAGAC | 7183 |
| Srebf2 | GACATATCTCTGGAGGGCAG | 7184 |
| Srf | GCACAGGCCTGAAAGTACAG | 7185 |
| Srf | GGCAGACACACATCTGGAGG | 7186 |
| Srf | GACCTCGCAGCCAGACTTGT | 7187 |
| Srf | GTGTTACAAAGCCCAGGTTA | 7188 |
| Srf | GACTCTCAGACCCTTAACCT | 7189 |
| Srf | GTGGCAAGTCACAAACTTCC | 7190 |
| Srf | GAGGACTGCAGGGCAGAAGA | 7191 |
| Srf | GTTGAAACTATCCTAGAGGA | 7192 |
| Srf | GTTCTAAGTCCAGATTTAAA | 7193 |
| Ssrp1 | GCTGGCTTTAATGTAGACTT | 7194 |
| Ssrp1 | GCCTGAGATGCAGCTGGCTA | 7195 |
| Ssrp1 | GGTATGTGCTCCTAAGAGGC | 7196 |
| Ssrp1 | GGCTTATCCTGTCTTTGTGT | 7197 |
| Ssrp1 | GACTTTGGCAAACAATGGCT | 7198 |
| Ssrp1 | GCCCTCCTGCACACATACAA | 7199 |
| Ssrp1 | GCTGCATTAAATTCAAGTGG | 7200 |
| Ssrp1 | GACTCTAAAGACTCAATGGA | 7201 |
| Ssrp1 | GCTTGCTATGGAATCCCACG | 7202 |
| Ssrp1 | GGAAGACCTGCCCAAGAGAA | 7203 |
| Stat1 | GTTCTGTGATGCCTTTGTGA | 7204 |
| Stat1 | GACAGTCATCAAAGGCACAA | 7205 |
| Stat1 | GTGCGGTGCAAACCGCAGAC | 7206 |
| Stat1 | GACACTTGGTCCTCGAGCCT | 7207 |
| Stat1 | GGCCAATCTCTGCCGCTGAT | 7208 |
| Stat1 | GTTCTCTCTGTGTTCTGCCT | 7209 |
| Stat1 | GGCTTGCGCAAGCTCAGTCT | 7210 |
| Stat1 | GGCTCGAGGACCAAGTGTCC | 7211 |
| Stat1 | GGAGCAGCTGCACCATTTCT | 7212 |
| Stat1 | GACTAAATGGGCAACGTCTA | 7213 |
| Stat2 | GGAACTACCGAAGCTACCCA | 7214 |
| Stat2 | GGATTGACATCAGGATGAGT | 7215 |
| Stat2 | GGATGCCACTTCACACGGAG | 7216 |
| Stat2 | GGTTGCCTCTCCGTGTGAAG | 7217 |
| Stat2 | GAGCTGCAGAGCAGAGGACA | 7218 |
| Stat2 | GAAGAGTGGACACACAGACC | 7219 |
| Stat2 | GGCTAAGAGCTGCAGAGCAG | 7220 |
| Stat2 | GCTTATGTTCTGTTTAGCAA | 7221 |
| Stat2 | GGGAAAGGAAACTGAAACCA | 7222 |
| Stat3 | GAGCTGCAGTGTAGACAGGG | 7223 |
| Stat3 | GGAGTGGATCACCCAGGTAA | 7224 |
| Stat3 | GAGTGGATCACCCAGGTAAT | 7275 |
| Stat3 | GTTATATATACACCTAGGGA | 7226 |
| Stat3 | GTGGCAATCAGCCACTTAGG | 7227 |
| Stat3 | GTGGGAAAGTCAGGAAGAAC | 7228 |
| Stat3 | GGCCATTCCTTAATTATGCA | 7229 |
| Stat3 | GGAGAGGCCATAGAATCCAC | 7230 |
| Stat3 | GTAATTACTAGATTGCGTGG | 7231 |
| Stat3 | GCCAGAACCATGCTCTTCCT | 7232 |
| Stat3 | GCTCCAGCAGGTTCAGCTCC | 7233 |
| Stat3 | GCACCTATGACAAAGGGAAG | 7234 |
| Stat3 | GTCTAGGATTTCACTGTGTG | 7235 |
| Stat3 | GACTTCACCAAGAACTTTCC | 7236 |
| Stat3 | GGCTCAGACTCACTCCTTAT | 7237 |
| Stat3 | GAGCACCTATGACAAAGGGA | 7238 |
| Stat3 | GAGTCTCGATCTGGTGGCTT | 7239 |
| Stat3 | GCCATTCTGGACAGCTTAGG | 7240 |
| Stat5a | GGCTTCAGTGTACCTGGGCT | 7241 |
| Stat5a | GGAGATAGGGCAGAAGAAAC | 7242 |
| Stat5a | GACCTTTCTAGGTCACTGGA | 7243 |
| Stat5a | GTCAATGCCTGGAAGTGGGT | 7244 |
| Stat5a | GAGAGAGCCAGAAGCAAGGC | 7245 |
| Stat5a | GCCCATTGCCTCATGGTAGG | 7246 |
| Stat5a | GCATGGGCAGTACCAAAGGA | 7247 |
| Stat5a | GGGTTTGCAAGGAGGATCAG | 7248 |
| Stat5a | GGCCTGCAAAGCACGTGGTA | 7249 |
| Stat5a | GCAGGGAGCCAGCTACCTTT | 7250 |
| Stat5b | GCACTTCTGTATCCCAAGGC | 7251 |
| Stat5b | GGGCTCTCAGATTCCCTAAG | 7252 |
| Stat5b | GTGTTTGGAGCCACAAAGGA | 7253 |
| Stat5b | GGGCAATCCACTGATCCAGT | 7254 |
| Stat5b | GGACCATACAGCTTCTATGT | 7255 |
| Stat5b | GAGGTGATAGCTTACAGGTA | 7256 |
| Stat5b | GTTCTTCAACACAAGAGGTA | 7257 |
| Stat5b | GGGAGTGACAGGTTTATCCA | 7258 |
| Stat5b | GCCTCCTTTCGTCATGATCG | 7259 |
| Stat5b | GAGCCTTCAAGTACAACTGG | 7260 |
| Stat6 | GGGAATGGATCAGTGCTAAG | 7261 |
| Stat6 | GGAAGTGTGAGTCCAAGAAC | 7262 |
| Stat6 | GCTCCATTGAACCACACTGG | 7263 |
| Stat6 | GTGGGCACCTGGAAGCACAT | 7264 |
| Stat6 | GAACCCTTAGCTCAGAATTC | 7265 |
| Stat6 | GTGCAAACTTAGATCCACCC | 7266 |
| Stat6 | GAGGGTAAGTTGTGAGGGTA | 7267 |
| Stat6 | GATACTGTAGGGAGGAAGTG | 7268 |
| Stat6 | GATGCACATGCGTGAGTTCA | 7269 |
| Stat6 | GCAGAGTGGCTTAAGCTGTG | 7270 |
| Stra13 | GAATAACATTGGCCTCCTGG | 7271 |
| Stra13 | GGCTTAAGGCATGGTGGCTC | 7272 |
| Stra13 | GCGTTCCACGTTCATTGGTT | 7273 |
| Stra13 | GTTGGGATGTGGGAGGGTTC | 7274 |
| Stra13 | GACCTCACCCAGCTGTTGGA | 7275 |
| Stra13 | GATCAGTCACAAGGGAGCAG | 7276 |
| Stra13 | GGCTCTGACAGCCATCAGGT | 7277 |
| Stra13 | GTTCAGGGCTTAAGGCATGG | 7278 |
| Stra13 | GCGTGAGGCTACAGGAAGGG | 7279 |
| Stra13 | GTAGAAAGTAAATGTGGTAG | 7280 |
| Sub1 | GTGGCCTTCGTGCCATTGGG | 7281 |
| Sub1 | GTAGACAGGAGTCACGGTGG | 7282 |
| Sub1 | GGATTTCCTCCGCGAGACTT | 7283 |
| Sub1 | GTACTTAGCTCCTGTATTCT | 7284 |
| Sub1 | GGCACGAAGGCCACGTGAAG | 7285 |
| Sub1 | GGCCCTTTCCAGGGCCTTAA | 7286 |
| Sub1 | GCTATAATAGTCTCCGTGCC | 7287 |
| Sub1 | GAGGCGGAACACCAAGTCCA | 7288 |
| Sub1 | GGAGTAGACAGGAGTCACGG | 7289 |
| Sub1 | GCTATAGGCTGCCCTGGAGG | 7290 |
| Suz12 | GAAGCTCTCAAGGCGAGAAA | 7291 |
| Suz12 | GCTCAGTCTCATCTCCACTG | 7292 |
| Suz12 | GAAAGGAGAAATGCACCTAA | 7293 |
| Suz12 | GCGGGTGACTGAGAAACTGA | 7294 |
| Suz12 | GATTTCGGCCATGGGTGGCT | 7295 |
| Suz12 | GCCAGACAAGACCAAGCTAG | 7296 |
| Suz12 | GCCTCTTTGAACTGAATTCG | 7297 |
| Suz12 | GTCAGGGTTCAGTTGTAGGG | 7298 |
| Suz12 | GCAACAACCTGTCCAATCAA | 7299 |
| T | GAACCTCTGCCGGGAGAGTG | 7300 |
| T | GTGATTCTCTTTCACAGTCG | 7301 |
| T | GCCTGAGACTTCCTGGAACT | 7302 |
| T | GAGTCTCCCTGGGAAGTCTT | 7303 |
| T | GCGTTTAACCTCTGGCGTGA | 7304 |
| T | GGTGCTCATTGCAGGAGGGT | 7305 |
| T | GGAGCACCGAGATCGGGATG | 7306 |
| T | GCACCAGCCAGTTTGTGTTG | 7307 |
| T | GGAATAAATCTCGGTGGAGG | 7308 |
| T | GGGCAGAGGAGGGTAGTCTA | 7309 |
| Tal1 | GGTGTGATCCTCACCCTGTG | 7310 |
| Tal1 | GTCGGGTTGTTTGTAGGGAG | 7311 |
| Tal1 | GGGTTCCTACAATGTACCTA | 7312 |
| Tal1 | GCCACCTTAGCTGGACAAGA | 7313 |
| Tal1 | GGAAAGACGGAGGAAACGGA | 7314 |
| Tal1 | GATAAGCGCCTCGGTCATTA | 7315 |
| Tal1 | GAATGTTAAAGGAAAGTAGG | 7316 |
| Tal1 | GAAACGGACGGGCAATTCCA | 7317 |
| Tal1 | GAGAGATCGAGGCGCTGGTG | 7318 |
| Tal1 | GAAGTGGCGTCGGTCTGCTT | 7319 |
| Tal2 | GATGGACATGTATTCAATAT | 7320 |
| Tal2 | GCGGTGTCCTATAAAGGCTG | 7321 |
| Tal2 | GGAACAGTTAAGTACAGCTA | 7322 |
| Tal2 | GATTAAAGTAAGGAGTCCTA | 7323 |
| Tal2 | GGACATGGTTATTTCAGGGA | 7324 |
| Tal2 | GTCATGGGCCATCAGGTGGT | 7325 |
| Tal2 | GTCTCTGCCACAGCCTTTAT | 7326 |
| Tal2 | GGTAGCATTGGTCTCTCCCA | 7327 |
| Tal2 | GAAAGATACAGGAGAGAAGA | 7328 |
| Tal2 | GCCTAGAACCTTGGTGCAGA | 7329 |
| Taz | GTTTCCAGACCCACCCAAAG | 7330 |
| Taz | GCCTGTAGACACTAGAATTA | 7331 |
| Taz | GGGAGGAACTTCAGAAGGAA | 7332 |
| Taz | GAATCCTGCGGGTAGGGAAA | 7333 |
| Taz | GGTATGAGAATCCTGCGGGT | 7334 |
| Taz | GCGCAGTTGGGTGTGTGTGG | 7335 |
| Taz | GTGCATAAGGTCCTTTGCTT | 7336 |
| Taz | GGTTTCCAGACCCACCCAAA | 7337 |
| Taz | GTATGAGAATCCTGCGGGTA | 7338 |
| Taz | GGTTTCCAGACACACCCAAA | 7339 |
| Tbp | GAGTAGCTGTTTCTGTCGCT | 7340 |
| Tbp | GAGCTGGTGTGAATTAGAAC | 7341 |
| Tbp | GTGCCGTTTGCTCCAGCAAC | 7342 |
| Tbp | GGCGTTCGGTGGATCGAGTC | 7343 |
| Tbp | GCCCAGCACTCAGTTGTGCA | 7344 |
| Tbp | GGTCCGACTGCCTAAGGCTG | 7345 |
| Tbp | GGAAGATTGAGGTGGGAGCC | 7346 |
| Tbp | GTTTGAGGAGATACAACCCA | 7347 |
| Tbx1 | GAGTCCCACGTGAGGATGTA | 7348 |
| Tbx1 | GCACCTGGGTAAGAGAGCTC | 7349 |
| Tbx1 | GGACTAAGAGGTGTAAGCTC | 7350 |
| Tbx1 | GTTGCTGCTACAGCCCGGGA | 7351 |
| Tbx1 | GAGAAATTCAGACCGCATGG | 7352 |
| Tbx1 | GAAGGTCTTATACTAGGGTA | 7353 |
| Tbx1 | GGGAACTTCAGGAATTCTAC | 7354 |
| Tbx1 | GGTACTGTCAGGCAGAGGTG | 7355 |
| Tbx1 | GCAACTAAGTGGAAGGATCA | 7356 |
| T1x1 | GTTAGGCCTTTCGTGTGGGC | 7357 |
| Tbx15 | GCGGTTGTCCCGGCAGATTC | 7358 |
| Tbx15 | GAGAGTTAAGAGACCTGCAT | 7359 |
| Tbx15 | GGTTGTTTGGAATAAGAGCC | 7360 |
| Tbx15 | GCCAGGTTTGGACTGAGAAA | 7361 |
| Tbx15 | GCTGCTGAGGGAAGGAGGAA | 7362 |
| Tbx15 | GGTGTTGATGCTTACCTTGA | 7363 |
| Tbx15 | GGTTATCTGTGGTGAATGAA | 7364 |
| Tbx15 | GTTGTTGCTTCCAGCAGCAG | 7365 |
| Tbx15 | GCCAACAGTTCACCAGGATG | 7366 |
| Tbx18 | GCTTTCTTCTGGCTTCTCCT | 7367 |
| Tbx18 | GTGACGAATGCACTGCCACT | 7368 |
| Tbx18 | GGAGTGTGTTCCTATAACTC | 7369 |
| Tbx18 | GGTCATTCTCTCCATACAGT | 7370 |
| Tbx18 | GCTCCATTGGACCATCTATG | 7371 |
| Tbx18 | GGGTTCAGCTTTCTAGAGAC | 7372 |
| Tbx18 | GAGAAACCTGCAGTTCCTTC | 7373 |
| Tbx18 | GGAGCTGTCCATCACCGAAA | 7374 |
| Tbx18 | GGCTGGGCGCTCTAGCTCAA | 7375 |
| Tbx2 | GAGGGTGGGAGTATCCACTG | 7376 |
| Tbx2 | GATTCTCCACACGCGCCAGA | 7377 |
| Tbx2 | GAATGGATGCGGGAAGGCTG | 7378 |
| Tbx2 | GACCGATCTGACCCGCCGTA | 7379 |
| Tbx2 | GCACTTCAGAGGGAGGCTGC | 7380 |
| Tbx2 | GATCATACACTTGCCTGTTT | 7381 |
| Tbx2 | GGTCCATGCACTTCAGAGGG | 7382 |
| Tbx2 | GAGCCCTCATAGAATGGATG | 7383 |
| Tbx2 | GGCGGGCAAATCAGGAGGCT | 7384 |
| Tbx2 | GCCATGGCAGAACCCTGATG | 7385 |
| Tbx20 | GCTGCATCGCTTTGCTCCTG | 7386 |
| Tbx20 | GCGCCTTAATTTGCTGGCGG | 7387 |
| Tbx20 | GTTTGTTTCCCTTCTAGTCT | 7388 |
| Tbx20 | GATGAGGAATTTGCTCTACT | 7389 |
| Tbx20 | GCAGATAGATGGTTCCGTGT | 7390 |
| Tbx20 | GGAGTCATCGTCGTTACTTA | 7391 |
| Tbx20 | GGTTTGTTTCCCTTCTAGTC | 7392 |
| Tbx20 | GAAGTGGCCTGAAGCAAGGA | 7393 |
| Tbx20 | GCTGACAGGCTTGTGTGTTC | 7394 |
| Tbx20 | GGGAATGACTGGGACATGGT | 7395 |
| Tbx22 | GTGCCAGCAGTGTCAGTCCT | 7396 |
| Tbx22 | GAGGAGCAGTTCGTGGAGGA | 7397 |
| Tbx22 | GGCTGTTGACTGTCCCTAGA | 7398 |
| Tbx22 | GGTGGTGGGTTGCCAGCCTA | 7399 |
| Tbx22 | GGATGAGGACATCTGTGGAG | 7400 |
| Tbx22 | GCCAGTTGTTGGCTTCTGAC | 7401 |
| Tbx22 | GCTGCTTGAGTGTACTTACC | 7402 |
| Tbx22 | GGAGATGCAGCCTGAGCTGC | 7403 |
| Tbx22 | GGGACATTAATGCTCTGGTG | 7404 |
| Tbx22 | GCCATTTAACATCAAGTTCC | 7405 |
| Tbx3 | GGAGAATCTACAAGGTTAGC | 7406 |
| Tbx3 | GTGTTCTGCCAGGGAGGCCA | 7407 |
| Tbx3 | GAGGCGCCTTCCCGTTTCTC | 7408 |
| Tbx3 | GCGAGAGAATATTTCTGCTA | 7409 |
| Tbx3 | GCGAGGGAGGATCAAGAAGA | 7410 |
| Tbx3 | GGGAATTCTAGAGGCGGAGG | 7411 |
| Tbx3 | GTTTATCACCCACCAGGAGG | 7412 |
| Tbx3 | GCAGTTCCTTCTCCCAGGTA | 7413 |
| Tbx3 | GCCCTGAGCTTTCCCTGGTG | 7414 |
| Tbx3 | GTCTCCGCTCATCCTAGGGT | 7415 |
| Tbx4 | GAGGGCAGCCAGGATATCTG | 7416 |
| Tbx4 | GAGGAAAGGGATGGTCGGAA | 7417 |
| Tbx4 | GTAACCGTGAACTCCGTGCC | 7418 |
| Tbx4 | GTGTCATTAGGAACTTCCTC | 7419 |
| Tbx4 | GACACATTGATGAGGATTGC | 7420 |
| Tbx4 | GCTTGTGCGAATGTGAGGAC | 7421 |
| Tbx4 | GCTAGGATAAGCTTCCTCCA | 7422 |
| Tbx4 | GTGTGTGCTCTCTTAAGGGC | 7423 |
| Tbx4 | GGAGACCTCCGTAGAGCAGC | 7424 |
| Tbx4 | GGGCATACTCTGAAACACCA | 7425 |
| Tbx5 | GCGACTATCTCACCAGCCGC | 7426 |
| Tbx5 | GGATGCAATGGGTCCCAGAG | 7427 |
| Tbx5 | GAACCAAGACTGGATGCATT | 7428 |
| Tbx5 | GGAAGGAAGTGTTTCTGGCT | 7429 |
| Tbx5 | GGGCCTGCTGATTATTTATG | 7430 |
| Tbx5 | GAGGGAAACAGAATGTGATT | 7431 |
| Tbx5 | GGCAGGCCTAGCTTATTGCC | 7432 |
| Tbx5 | GGACAATGAGTCTGAAGTGG | 7433 |
| Tbx5 | GATGTCAAGGCAGCTAGTCC | 7434 |
| Tbx6 | GGGACGCAGTTTGGCGCTTC | 7435 |
| Tbx6 | GTTTATCTTGTGGGAGGGCC | 7436 |
| Tbx6 | GGGAATTGTAGTTCAGACTG | 7437 |
| Tbx6 | GGGTCACCTTCCAGAAAGTC | 7438 |
| Tbx6 | GCTGTGATCTCTGGTTTGGA | 7439 |
| Tbx6 | GCTAAGACAGGGACGCAGTT | 7440 |
| Tbx6 | GGGAGCATAAAGCCACTACC | 7441 |
| Tbx6 | GCTCACATGGAATACAGAGA | 7442 |
| Tbx6 | GCAACCTGTGCTGGGATCCC | 7443 |
| Tbx6 | GCCTTTACGTGCGACTGGCG | 7444 |
| Tceb2 | GCCACAAAGCATGGCTGAAT | 7445 |
| Tceb2 | GGAAGGTGAGCTGTTGACCC | 7446 |
| Tceb2 | GACTTCTGCTGTAGTTATTA | 7447 |
| Tceb2 | GCTCTTGCAGGGAATGTGAG | 7448 |
| Tceb2 | GGCTTCCGGATCGCTTAAGA | 7449 |
| Tceb2 | GAGTAGTGTTAGGCAAGGTA | 7450 |
| Tceb2 | GTCCTCTCCCTCCAGGAACC | 7451 |
| Tceb2 | GGATATTGTCCTCTCCCTCC | 7452 |
| Tcf12 | GCGCAGTGAGCTTGAGGAGA | 7453 |
| Tcf12 | GGTGAGCAAGCTGATGAGCG | 7454 |
| Tcf12 | GTATATTGCATAACCCAAAG | 7455 |
| Tcf12 | GAGGAGGTTTAGGAACTGCC | 7456 |
| Tcf12 | GGGTTTGGTTATCCGTAATT | 7457 |
| Tcf12 | GAGCACAGAGAAGACCAGCC | 7458 |
| Tcf12 | GAGATTGTACCACAGAAATA | 7459 |
| Tcf12 | GGGATTTGTTGGCAGGTCGG | 7460 |
| Tcf12 | GGAAGTTAAGGTTTACTTGA | 7461 |
| Tcf15 | GGGATATGCTCACTTTGGGA | 7462 |
| Tcf15 | GGTCGTCGCCTTATAGCCGG | 7463 |
| Tcf15 | GAAGTGACAGGATCAGCTAT | 7464 |
| Tef15 | GTAGTTATTAAGTGACTGAA | 7465 |
| Tcf15 | GCTGTCCAGGAGCGCAGATC | 7466 |
| Tcf15 | GACAGGATCAGCTATAGGTA | 7467 |
| Tcf15 | GAAGACATCTTCCAGCTCCA | 7468 |
| Tcf15 | GCTCAGTTCAAGGCCAGCAG | 7469 |
| Tcf15 | GGAGACCACTCAGCAAGAGA | 7470 |
| Tcf15 | GATATGATGTGAGGGCTGGC | 7471 |
| Tcf3 | GGTGTGATGGTAATCTTTGT | 7472 |
| Tcf3 | GTGAAGACTGAGCAGAAGCT | 7473 |
| Tcf3 | GCCCTTCCTGTGTGATGCTG | 7474 |
| Tcf3 | GTGCGTGTATACCGCCGCGT | 7475 |
| Tcf3 | GAGGCCGCGAGAAACTCAAC | 7476 |
| Tcf3 | GACAGTGGGCGTGGTCACTT | 7477 |
| Tcf3 | GGCGGGCAGACATAGAAGGA | 7478 |
| Tcf3 | GAAGGTGAGGGAGAGGGAGC | 7479 |
| Tcf3 | GATGAATTCCCACAGAAAGG | 7480 |
| Tcf7 | GTGAAACGGGCATCCCGGCT | 7481 |
| Tcf7 | GTTTCAACTGCTTTCCCAAG | 7482 |
| Tcf7 | GGTGAATGAGTCCGAAGGCG | 7483 |
| Tcf7 | GATCATCCCTGTGCCGATTA | 7484 |
| Tcf7 | GAGGTTGTCCCGGCTAACTT | 7485 |
| Tcf7 | GGCACAGCAGCTTTGGGAGC | 7486 |
| Tcf7 | GAAGAAGGCGCTAGAACCGG | 7487 |
| Tcf7 | GGTTGTCCCGGCTAACTTTG | 7488 |
| Tcf7 | GAGGTCGAGAGACCCGGAAT | 7489 |
| Tcf7 | GAAGCCTCTCAGCGTCTCAG | 7490 |
| Tcf7l2 | GGGCAGCCTGGGAGTTGAGA | 7491 |
| Tcf7l2 | GGCGGCCAACAATGATCCTT | 7492 |
| Tcf7l2 | GATGCTTTGGCCGCTAACTT | 7493 |
| Tcf7l2 | GAGGTGGTGGTGGACACCAG | 7494 |
| Tcf7l2 | GTGGTGGTATCCAGATGGGT | 7495 |
| Tcf7l2 | GGGTGGTCAGTGGGTGTTGA | 7496 |
| Tcf7l2 | GGGTTGATAATGGCATTAGA | 7497 |
| Tcf7l2 | GCACAATATAGACTATGCCA | 7498 |
| Tcf7l2 | GGGATAAGCATAAACAGTTG | 7499 |
| Tcf7l2 | GGCCATCTACAGGGAGGGTA | 7500 |
| Tead1 | GCCATAGGAAATGGGTCTTA | 7501 |
| Tead1 | GTGTTCTCTGAATGATGGCT | 7502 |
| Tead1 | GGCTCCTTTCTGGGAAACTA | 7503 |
| Tead1 | GTCTTATTCGCTGGTGTTAA | 7504 |
| Tead1 | GCTGGTCAGGCCATAGGAAA | 7505 |
| Tead1 | GATGTAGGCATTGATCTTTG | 7506 |
| Tead1 | GGATGCAGTTGGTAGAGTGA | 7507 |
| Tead1 | GAAGGGTAACTGGCCTGTCA | 7508 |
| Tead1 | GGACAGACATGCTGGCAGTT | 7509 |
| Tead1 | GTGAAACCATAGACCAAGCC | 7510 |
| Tead2 | GAGACCCAGAGAAAGTTGCC | 7511 |
| Tead2 | GCAAACACCCAGGGTGACCC | 7512 |
| Tead2 | CCTTAGACTTGGGATTTCTT | 7513 |
| Tead2 | GCAAGCAGGGACTGAGTGAG | 7514 |
| Tead2 | GGGCAGAGAGTTGGAACCCA | 7515 |
| Tead2 | GCCAGGCTCTGCCTCTAAGT | 7516 |
| Tead2 | GTCCATCTAAGGACTGGGTA | 7517 |
| Tead2 | GATGAGTCCATCTAAGGACT | 7518 |
| Tead2 | GTGGATCTTCAGAAACGCAG | 7519 |
| Tef | GTCAGGTTGCCCACTGATTT | 7520 |
| Tef | GGTCCCTAGGATGGTCGTTA | 7521 |
| Tef | GGCTGGAATCAAGAGGGAGC | 7522 |
| Tef | GGTTATGGTTCCCAGACTGG | 7523 |
| Tef | GTTACATTTGTGTGTGCAAG | 7524 |
| Tef | GAGCAACTGGATAATTCCCA | 7525 |
| Tef | GAATTATCCAGTTGCTCCAC | 7526 |
| Tef | GACTGGCCTGTTGTGTTGTT | 7527 |
| Tef | GCTCCACTCTTGGAAGGCTG | 7528 |
| Tef | GCGGAGCGATACTCCTCACC | 7529 |
| Tfam | GGGATGGATGGATGATGATG | 7530 |
| Tfam | GTACAGGTAGGCAGCAGAAG | 7531 |
| Tfam | GCTTCGTGACGCTGGTGCTG | 7532 |
| Tfam | GCCCAGGAGAACACATGGCA | 7533 |
| Tfam | GTCCCACAATTTCAGTGGTT | 7534 |
| Tfam | GATGGTAAACTGGGCTTAGA | 7535 |
| Tfam | GCAGCATTCCTCCTCAGCAG | 7536 |
| Tfam | GAAACATGCAGTTTGCTGTT | 7537 |
| Tfam | GATCTCTAACTTCAGTAGCC | 7538 |
| Tfam | GTTGTGACAGGAGGTTTGAA | 7539 |
| Tfap2a | GTCAGCTCTGGTCTTGTCTC | 7540 |
| Tfap2a | GTCGTTGATCCACAATTAGC | 7541 |
| Tfap2a | GGACGAAAGGCAGATAGTGG | 7542 |
| Tfap2a | GAGTTGTGGTAATGAAGCTC | 7543 |
| Tfap2a | GCGGTTTGGCTCACTCCAGA | 7544 |
| Tfap2a | GCAGTGTGGGCGCTGATGAA | 7545 |
| Tfap2a | GGACCCGAAGACAGGCGAAG | 7546 |
| Tfap2a | GTTGTTGTCCACGTTGCACC | 7547 |
| Tfap2a | GAGCGGAGGCGATCTCTAGT | 7548 |
| Tfap2a | GATTTGGCTGAGACTCTGCA | 7549 |
| Tfap2b | GAGGCTCCGTGAGTAGGAGA | 7550 |
| Tfap2b | GAGTCCTCAGCTTGGCTGTT | 7551 |
| Tfap2b | GCCGGAGCTCTAGAATGCAC | 7552 |
| Tfap2b | GTTCAGATTTCTTTCAGAAC | 7553 |
| Tfap2b | GCCAGTGCTATGTTTACTAT | 7554 |
| Tfap2b | GTGCCTCCCTACTGACTCCA | 7555 |
| Tfap2b | GGAGACTTTGCTCTCCAGAA | 7556 |
| Tfap2b | GTGCATTCTAGAGCTCCGGC | 7557 |
| Tfab2b | GAGGTGAGTGCATTCATGTG | 7558 |
| Tfap2b | GATTTCTGATCGGGTTTCTG | 7559 |
| Tfap2c | GGTATCAAGAATTGTGTAAT | 7560 |
| Tfap2c | GTCTCACATTTGGGCATTTA | 7561 |
| Tfap2c | GTGGTGGCAGGATAGGAGAC | 7562 |
| Tfap2c | GGGTAGCAGGGACACAGGAG | 7563 |
| Tfap2c | GTGAGAACCTTGACCATGGC | 7564 |
| Tfap2c | GGAAGTGACACTCTCAGGTA | 7565 |
| Tfap2c | GAGATATGGGAGTGGAAGGA | 7566 |
| Tfap2c | GAAGAGGATTGCGAGGTGAG | 7567 |
| Tfap2c | GCTCCGGTGCAGAAAGCACT | 7568 |
| Tfap2c | GCTTCAAACAGTGGAATTGG | 7569 |
| Tfap2d | GAGGGTGCTGGAAAGGGACA | 7570 |
| Tfap2d | GTGGGAAGATGATATAAAGA | 7571 |
| Tfap2d | GTACTTGCTGAGAATTTCTT | 7572 |
| Tfap2d | GGAGCATCTGTCTTCAGTTA | 7573 |
| Tfap2d | GTTAGTTGCTGAACACTCTT | 7574 |
| Tfap2d | GTCTGTAAGCTGCATGTATT | 7575 |
| Tfap2d | GGCCTGTCACTCAGAGCTAT | 7576 |
| Tfap2d | GCAATCAGTCTTGCCCAGTT | 7577 |
| Tfap2d | GGACTTGGTCTTTAAGTAGG | 7578 |
| Tfap2e | GAGGGAAGCAGGCACAGACA | 7579 |
| Tfap2e | GACTGGGAAGGACACATTTG | 7580 |
| Tfap2e | GGCTAGAACGAAGCCGAGGC | 7581 |
| Tfap2e | GCTGTGAAGCCTTTCTCTTC | 7582 |
| Tfap2e | GGAACCAGCAGCTATGATGG | 7583 |
| Tfap2e | GTTAGGAGACTCCATATTAA | 7584 |
| Tfap2e | GCGGGCAGAGTAAGAGGAGC | 7585 |
| Tfap2e | GACTCCTACTCTCTGTGCCT | 7586 |
| Tfap2e | GACAAATGGTCATTAGACTT | 7587 |
| Ifap4 | GAAAGAGGCAAGACAGGACC | 7588 |
| Tfap4 | GGCAGCCACCTGGGTAAAGA | 7589 |
| Tfap4 | GCAAGGTACCTCGGATGTTT | 7590 |
| Tfap4 | GCAAGTGGGAAGGAAGGGAA | 7591 |
| Tfap4 | GGAAGAGAGAGCAAGTGGGA | 7592 |
| Tfap4 | GACCCATTCGCTGCCTTCCA | 7593 |
| Tfap4 | GATTTGGGTGGAACCTTGGA | 7594 |
| Tfap4 | GAGAGAGCAAGTGGGAAGGA | 7595 |
| Tfap4 | GCGCTAGAATTCTGGATTAC | 7596 |
| Tfcp2 | GTAATTAATCCTCAGGAGCA | 7597 |
| Tfcp2 | GAGTTTAGGACTGGAGACAC | 7598 |
| Tfcp2 | GTCTCTTCTTCATTGGTAGA | 7599 |
| Tfcp2 | GCCGTAGCGGACGTCCTGAT | 7600 |
| Tfcp2 | GTCCTGATTGGTTGGCGCTG | 7601 |
| Tfcp2 | GAAGATAAGGGAAGGCAAAT | 7602 |
| Tfcp2 | GTTAGAGTCCTTTCAGTGAG | 7603 |
| Tfcp2 | GTGATAGGCTATCGACGCGA | 7604 |
| Tfcp2l1 | GCAGAGCCAGCAAAGGAAGG | 7605 |
| Tfcp2l1 | GGGAGAGCTGGGAAGGGAAG | 7606 |
| Tfcp2l1 | GTCAGGTGGGCGTGGCATTA | 7607 |
| Tfcp2l1 | GAGTTGGGTGTGATAGCTAC | 7608 |
| Tfcp2l1 | GTTCCTAGAGGTGAACCCAC | 7609 |
| Tfcp2l1 | GTCAGCTGTGACCTGAGTGG | 7610 |
| Tfcp2l1 | GTGGATGTGTGACAATGCAA | 7611 |
| Tfcp2l1 | GTGCCTATGCTTGCAGGCCC | 7612 |
| Tfcp2l1 | GCAAGTGCCAGCTCCCAGAA | 7613 |
| Tfcp2l1 | GGAGATGGGATGAAGTGTCC | 7614 |
| Tfdp1 | GATGCTAAAGAAGGGCTGTT | 7615 |
| Tfdp1 | GCATATCTGTGTGCATGCGC | 7616 |
| Tfdp1 | GTCAGTAGTTGAGCAGAGGT | 7617 |
| Tfdp1 | GACAAGACTTGCCACCTCCC | 7618 |
| Tfdp1 | GTCATGGGACTGAGGCAGCC | 7619 |
| Tfdp1 | GTGCATGCGCAGGGAGTAGA | 7620 |
| Tfdp1 | GCTATTGACACACTCATGCC | 7621 |
| Tfdp1 | GCTTCAGCAATAAGCAGCTG | 7622 |
| Tfdp1 | GGGAGCATTTCCATTTAGAG | 7623 |
| Tfdp1 | GCCTGGGCTGTCAGTGATTC | 7624 |
| Tfdp2 | GTTTCATGGATCCTTTGGTT | 7625 |
| Tfdp2 | GACAGACACCTTAGTTATGT | 7626 |
| Tfdp2 | GGCTGGCACATTAAATGTTT | 7627 |
| Tfdp2 | GCAAACACTGGTTTCACAGC | 7628 |
| Tfdp2 | GCTAAACTGAAACTATGAGT | 7629 |
| Tfdp2 | GAGCTTTGCTGTATGGAACC | 7630 |
| Tfdp2 | GAATAAATTGACTTGCTCCA | 7631 |
| Tfdp2 | GAAGCATGGCCTATCTCAGG | 7632 |
| Tfdp2 | GTTTGGGTTAATGTGGAGAA | 7633 |
| Tfdp2 | GCCAACAATGATATGATACA | 7634 |
| Tfe3 | GAACTGAGAGACCGGCTGGG | 7635 |
| Tfe3 | GTCTCAGGATGCTGGGAAGT | 7636 |
| Tfe3 | GGGAGGCAGAGGTGTTATTT | 7637 |
| Tfe3 | GAGGAGGCAGCGGCAAACAG | 7638 |
| Tfe3 | GAGGAGGGCAGAGTCATATT | 7639 |
| Tfe3 | GCTCCATGGCTTAACGGAGG | 7640 |
| Tfe3 | GCTGCCTTGCTCAGGAGGTA | 7641 |
| Tfe3 | GAGTCATCACCCGCCCTGAA | 7642 |
| Tfe3 | GCGGTAGGGAACACCGGCTT | 7643 |
| Tfe3 | GTAGTGGGAGTGCGTGAGGA | 7644 |
| Tfeb | GAGCTTCCAGCAGGAGGGAC | 7645 |
| Tfeb | GTTGTCATTGCCTGGGTTGT | 7646 |
| Tfeb | GTCAGATTCCTTGGGTCTCG | 7647 |
| Tfeb | GTTGAGTCATTTGTATGTAG | 7648 |
| Tfeb | GTGAAATGGAGTTGGAAGCC | 7649 |
| Tfeb | GACATGGGCAATAACAGGGT | 7650 |
| Tfeb | GGTATGAAATACTCAGGATG | 7651 |
| Tfeb | GTGGAAGTTGCTAAGGGATA | 7652 |
| Tfeb | GATGACACTGAGTAAGTCCC | 7653 |
| Tfeb | GGAGTCTTGATTGCAGATAT | 7654 |
| Tfec | GAATGGAGACAAACAGCTCG | 7655 |
| Tfec | GTGTAATTCCTAACTGAAAG | 7656 |
| Tfec | GAATTTACAATGGCAGTATG | 7657 |
| Tfec | GTGCTGTGGTCATGCATTTG | 7658 |
| Tfec | GTCCTTGCCCACTTTCAGTT | 7659 |
| Tfec | GCCATTACTGCAGCAGAACT | 7660 |
| Tfec | GCAATAACGGCATCAATGAG | 7661 |
| Tfec | GAATGTGTTGCAATAACTGT | 7662 |
| Tgfb1 | GGCGGCAGGGACAGAATGTA | 7663 |
| Tgfb1 | GGCACAGTGCACCTTGGTAT | 7664 |
| Tgfb1 | GGTTTCAATGCTGGGAACCC | 7665 |
| Tgfb1 | GCAGCAGCAGGCCGATACCA | 7666 |
| Tgfb1 | GGCCACTAGAAACCTAACGA | 7667 |
| Tgfb1 | GGGTAGAAAGGGCTGTGGGT | 7668 |
| Tgfb1 | GTTGGAGGGAGCAGCTAGCA | 7669 |
| Tgfb1 | GATCGAAGTGGCGCAGCAGC | 7670 |
| Tgfb1 | GTGGGTGAGAAGGACAGTGG | 7671 |
| Tgif1 | GAACAACTATTCCTTGTATG | 7672 |
| Tgif1 | GAGCAGAAGGTGTGCACTGG | 7673 |
| Tgif1 | GAGTTCCGGATTGGATTGCA | 7674 |
| Tgif1 | GCTGTGTCTCTGATGGCAGT | 7675 |
| Tgif1 | GCTCTTTAAACGTCTGGGCT | 7676 |
| Tgif1 | GCACCAGTGCGGGACATGTG | 7677 |
| Tgif1 | GGTGCGGTTCATATCCTCAA | 7678 |
| Tgif1 | GTGTGGGCGCTCTGAGTTGG | 7679 |
| Tgif1 | GAAGGAATCCTTCAATTGCA | 7680 |
| Tgif1 | GATCAAAGGGCAGGCTTTAG | 7681 |
| Tgif2 | GCCACCTCCAAATTGCGACA | 7682 |
| Tgif2 | GAAGACTGTTCGGATGCTGT | 7683 |
| Igif2 | GAGGCGAACTTACAAAGGTA | 7684 |
| Tgif2 | GCCTGGATCGTATGAGATCC | 7685 |
| Tgif2 | GCGGCATTCCTAAGGTGGGT | 7686 |
| Tgif2 | GCCCTCTCCCAGAGGAGCTT | 7687 |
| Tgif2 | GCCAGTGTCCTTTGGCCAGG | 7688 |
| Tgif2 | GACCCGCTTGGCAGGATCCA | 7689 |
| Tgif2 | GGCATCTGTCACTCCCAGGC | 7690 |
| Tgif2 | GGCACATCTCCAGATTCACT | 7691 |
| Thra | GGAGCCAGAGAGTGTGTCTG | 7692 |
| Thra | GTACAGCGGCAGCTGCAGTG | 7693 |
| Thra | GTCTGTTATCAGCCCATATT | 7694 |
| Thra | GCTGGAACTAAGATGTGCAA | 7695 |
| Thra | GTTGCATGTCCGCTGGGAGC | 7696 |
| Thra | GATAGAATCGTTTGCTGAGT | 7697 |
| Thra | CATCCTAGCATCTGGCGAGA | 7698 |
| Thra | GCAAACGTCTCTGTTCTCCA | 7699 |
| Thra | GAAGTAGGCTCTTGGGATTG | 7700 |
| Thra | GTGACTAGAAAGAGCTTCCA | 7701 |
| Thrb | GAGTTACAACCCAAGCATGG | 7702 |
| Thrb | GCTGTAAAGGTCTTAAGCTG | 7703 |
| Thrb | GGGTGAGGGAGGAACACATG | 7704 |
| Thrb | GTAATCATTFCCTAATCACG | 7705 |
| Thrb | GCTCCAACAGGAAATTTGGT | 7706 |
| Thrb | GACCTTCGGAACTTGAGGTA | 7707 |
| Thrb | GCAAGTGCAGAACCCTTCCA | 7708 |
| Thrb | GGGCTGTCTGGTTAGGAACT | 7709 |
| Thrb | GACTCTCAGGTGGGAGTCAC | 7710 |
| Thrb | GGAGGTGGCAGATTCAGACA | 7711 |
| Tle4 | GAGCCTGAGGGCTATTGAAA | 7712 |
| Tle4 | GTTTGTGTGTTCACAAGCCC | 7713 |
| Tle4 | GGGTTCTGACCCTCTTCCGT | 7714 |
| Tle4 | GCTGTCAATCAAAGTAACGT | 7715 |
| Tle4 | GCATCTTTAGAAGCAGGTTT | 7716 |
| Tle4 | GCCCAATTCAAGGCGTTCTG | 7717 |
| Tle4 | GCCTGCACTTCGAGTTAAGG | 7718 |
| Tle4 | GGCACCAGTCAACTTACTCC | 7719 |
| Tle4 | GATGACTTTGGTGGCACTAA | 7720 |
| Tle4 | GCACTAGGGAACAGCGGCCA | 7721 |
| Tlx1 | GGTATGCGGAGTAAATGCCC | 7722 |
| Tlx1 | GCTAACCACGCAATCTCAGT | 7723 |
| Tlx1 | GGTGCTTGTCCCAGGGTAGC | 7724 |
| tlx1 | GCCTTACAGAGTAGCCCTGT | 7725 |
| Tlx1 | GAAAGAGGTACCTTGAGGAA | 7726 |
| Tlx1 | GAAGTACAGCACTGGTGGGA | 7727 |
| Tlx1 | GAACCTTTCCCAGACCTGGT | 7728 |
| Tlx1 | GACAGACGGACCAAAGGAGA | 7729 |
| Tlx1 | GTGCTTGTCCCAGGGTAGCT | 7730 |
| Tlx1 | GACCAGCAGGTGTCAGGAGC | 7731 |
| Tlx2 | GTAAGCACAGCCGCCCTTTG | 7732 |
| Tlx2 | GCCAAAGTGGAGCACTGGAT | 7733 |
| Tlx2 | GCTAGTTCAGGTTGAAGATG | 7734 |
| Tlx2 | GGTCCAGGCCTGTCATAGTG | 7735 |
| Tlx2 | GGGAGTGGAGGTGCAGATAG | 7736 |
| Tlx2 | GTGTTAACCCAGTGGAGGGT | 7737 |
| Tlx2 | GAAGTCAGGCAACTCAGGGT | 7738 |
| Tlx2 | GTCACAGGGTGGGAGGTAGA | 7739 |
| Tlx2 | GGATATTTGGGCATCTGGAC | 7740 |
| Tlx2 | GGTGTTAACCCAGTGGAGGG | 7741 |
| Tlx3 | GGAATTGATGGTCAGACTGG | 7742 |
| Tlx3 | GGTCACCTTTCTCTCGGTCT | 7743 |
| Tlx3 | GGTATGAGATGACCAGGACA | 7744 |
| Tlx3 | GTGTCCAGGCCTGGAACCCA | 7745 |
| Tlx3 | GAACGGTCCTACGAAATCTG | 7746 |
| Tlx3 | GACCCAGAGTCATTTCTTAG | 7747 |
| Tlx3 | GCAGAGATGCAACCCAAGAA | 7748 |
| Tlx3 | GGACCCGAGGTCAACTGGTG | 7749 |
| Tlx3 | GGTTTGAGAAGCTGCGGTTC | 7750 |
| Tlx3 | GGAGCTTAGGGACTGTTCCA | 7751 |
| Trerf1 | GACTTAGGAGAGTCGAGCTG | 7752 |
| Trerf1 | GCAGGAAGCAATCCTGCAAT | 7753 |
| Trerf1 | GACAGGGCTATGACAGAAGA | 7754 |
| Trerf1 | GAACCCTCAGATCCCTTCCT | 7755 |
| Trerf1 | GGCGATAAGACAGGTACAAG | 7756 |
| Trerf1 | GTTCCCTGAGCGAGTTGGCT | 7757 |
| Trerf1 | GCGTTGCAAATCTAACGACT | 7758 |
| Trerf1 | GTGGGATGGGTCAGGGACAG | 7759 |
| Trerf1 | GGCTCTGACTGAAGGAAGAG | 7760 |
| Trerf1 | GTCTCTGAACTGGAGAGGAT | 7761 |
| Trim24 | GGAGCTTTAGAGAAAGAGTA | 7762 |
| Trim24 | GCTGGATTAAGGTTTACAGA | 7763 |
| Trim24 | GAACTACTGCACIATGGGCC | 7764 |
| Trim24 | GATTTACAGCTTGCCTGCAT | 7765 |
| Trim24 | GGAGTCATTTGAAGCCACAC | 7766 |
| Trim24 | GAATTTCCGGTAACAAGCAC | 7767 |
| Trim24 | GGTGTGTCCAGTGAGGTCAA | 7768 |
| Trim24 | GTAACAGGTGGCACTTCCCA | 7769 |
| Trim24 | GGGCAGACTCAGCTGGATTA | 7770 |
| Trim28 | GCCGAGGAAGGAACAAAGGC | 7771 |
| Trim28 | GTTCAGCGCTCACCCTTCGG | 7772 |
| Trim28 | GAACCAGGTGTTCACCCACG | 7773 |
| Trim28 | GGAAGTGAGAGTCCAGAGGC | 7774 |
| Trim28 | GGTAGGAAGTGAGAGTCCAG | 7775 |
| Trim28 | GGAAGCTGGCAAAGCAAGCA | 7776 |
| Trim28 | GGGACAATACAGGGTGGGCG | 7777 |
| Trim28 | GTTGCCCGCAAGCAGTTCCA | 7778 |
| Trim28 | GGTTCACAGGCACCCTATCC | 7779 |
| Trp53 | GATGGCTATGACTATCTAGC | 7780 |
| Trp53 | GGAGGATGCGGAGAGCCTAT | 7781 |
| Trp53 | GGTTGGTCATCACCACCGCA | 7782 |
| Trp53 | GGCTAGGTTGGTTGTGTCCC | 7783 |
| Trp53 | GAACGCGCTGAAGTGGATGA | 7784 |
| Trp53 | GTCTGTCAACAGGTGACGCA | 7785 |
| Trp53 | GTAAGTGACACTGGAATCTG | 7786 |
| Trp53 | GGATAGCCTCCCTCCTGACC | 7787 |
| Trp53 | GCCTAACCCAGGACTATACA | 7788 |
| Trp63 | GCTGAAAGGGAGGCAGAAGG | 7789 |
| Trp63 | GACACTAGAAGCCAAGACTT | 7790 |
| Trp63 | GGAAGTCTGTGTCTTTGCCT | 7791 |
| Trp63 | GTCAGATTTGGCTGGAGCGC | 7792 |
| Trp63 | GATGCATGTTGCAGATTTCA | 7793 |
| Trp63 | GTCTATGGCTGTGGCATGAA | 7794 |
| Trp63 | GAGGACCACTACCAGGTGCA | 7795 |
| Trp63 | GAAGCTGAGTTCAGGGCAAC | 7796 |
| Trp63 | GATAGTACGACCCTCTTCCA | 7797 |
| Trp63 | GATCCCATGCCAGGGATCCC | 7798 |
| Trp73 | GGGCAGTGGTATCCACTGTA | 7799 |
| Trp73 | GTCTTGGGAGATTGAGTGGA | 7800 |
| Trp73 | GAGGGAGAAGGAAGCTGGTT | 7801 |
| Trp73 | GATCCCTACGCTGGTCTGAG | 7802 |
| Trp73 | GAAACCACTGGAAGTGGTGG | 7803 |
| Trp73 | GAGTCAGGTGTGAGTTCTCA | 7804 |
| Trp73 | GTGTTGTGGAGAGAACGCCA | 7805 |
| Trp73 | GTGGACTTGATTCAGAGGTG | 7806 |
| Trp73 | GGCTCACAGACTCTCAGGCC | 7807 |
| Trp73 | GCAAGCTCTCTGGAGGGAGA | 7808 |
| Tsn | GACACTTGGCTCGTAGAAGG | 7809 |
| Tsn | GAGCATGCATAAACTGAATG | 7810 |
| Tsn | GAGTATCATGAAGATCTCTC | 7811 |
| Tsn | GTCTACCACATCCTGAACTT | 7812 |
| Tsn | GGCTGGTGAGAAGTGTTGGG | 7813 |
| Tsn | GTTACTGTAACCTTCAACCA | 7814 |
| Tsn | GCAGCAACATTTGGGAAGAG | 7815 |
| Tsn | GTGGCTCCAGCAGCAACATT | 7816 |
| Twist1 | GAAAGTACAGTCGGGTTTAC | 7817 |
| Twist1 | GCAGAAAGCGGTGTCTTACC | 7818 |
| Twist1 | GAGAGCCCAGACGTTTCTCC | 7819 |
| Twist1 | GGTGTCATTGGCCTGACGTG | 7820 |
| Twist1 | GCGGTGTCATTGGCCTGACG | 7821 |
| Twist1 | GTCGGAAACCTCTAGTCCCA | 7822 |
| Twist1 | GGAGAACTCCGAGGGATCCC | 7823 |
| Twist1 | GGCGAATCAACTCTCAGCAA | 7824 |
| Twist1 | GGTGAGGAGAAATAGTACCC | 7825 |
| Twist1 | GCAGCCCATCTCAGCTTGTC | 7826 |
| Twist2 | GAACCTATTCCCAGGTGACC | 7827 |
| Twist2 | GCTCAGTTCAGCCAGAGGAT | 7828 |
| Twist2 | GTGGCTCCTTAAACATTCTC | 7829 |
| Twist2 | GGCGTCTCTATAGATCCTAG | 7830 |
| Twist2 | GCCTGGGCTCTCCACCTTTG | 7831 |
| Twist2 | GGCAGGGCCAAATCTGCTCC | 7832 |
| Twist2 | GGAGCAGATTTGGCCCTGCC | 7833 |
| Twist2 | GAGCAGATTTGGCCCTGCCA | 7834 |
| Ubp1 | GGTATCTGTGTGTGTGTGTG | 7835 |
| Ubp1 | GTTCTTCTCAAAGCTTGTTA | 7836 |
| Ubp1 | GGGAAGGAAGGCAGCCAAAT | 7837 |
| Ubp1 | GGACGATCCATGCCTTGGGA | 7838 |
| Ubp1 | GGACCCACATCCGAATCCTT | 7839 |
| Ubp1 | GATCCATGCCTTGGGAAGGA | 7840 |
| Ubp1 | GCAATAATCGAGGGCCGGCT | 7841 |
| Ubp1 | GGCCAATGAGCTCTTACTTA | 7842 |
| Ubp1 | GTTCCAGGTCCTACTTCCGT | 7843 |
| Ubtf | GGAGCAGATGAGGACTAGGC | 7844 |
| Ubtf | GGGTTTCTTCCGTGCGTGTT | 7845 |
| Ubtf | GAAGGGCTGCAACCAAGTGC | 7846 |
| Ubtf | GGTCATGAGTCTTAAGATGT | 7847 |
| Ubtf | GGTTTCTTCCGTGCGTGTTG | 7848 |
| Ubtf | GTTACTGAAGCCCAGGGTAA | 7849 |
| Ubtf | GGAGCAATGGGAGAGGGAGC | 7850 |
| Ubtf | GAAACGCAGAGCGATGGAGG | 7851 |
| Ubtf | GCGTTTCTCTTCCAATCAGC | 7852 |
| Ubtf | GACACACACCAGTGGCGACA | 7853 |
| Uncx | GATGATCAGGCTTCCTTCTG | 7854 |
| Uncx | GATGCCACCCCAGAGGAGGA | 7855 |
| Uncx | GATGATGAATCTCCCATTAT | 7856 |
| Uncx | GGCCCOGACATGAGTGTTGG | 7857 |
| Uncx | GCAAACTTGTCACTGTGCCC | 7858 |
| Uncx | GCTCCTTCAGAGACAGAGGG | 7859 |
| Uncx | GCATCCAGGACCCATATGTG | 7860 |
| Uncx | GCTGTGATCAATCCAGCCCG | 7861 |
| Uncx | GGGTTAGACTCCTTATAGGT | 7862 |
| Usf1 | GGGCCACAAGAGGGACAACA | 7863 |
| Usf1 | GGATCAGGGCATCACTTTGA | 7864 |
| Usf1 | GGCCACCATTTAGCAATGGT | 7865 |
| Usf1 | GGATGGAAGTACAATTTAGT | 7866 |
| Usf1 | GCTACAGCCATCTGAACCAG | 7867 |
| Usf1 | GCAAGCCCATGTCCAAGGCC | 7868 |
| Usf1 | GGATCCAGAGCATGTGTTCC | 7869 |
| Usf1 | GACCTGTATTCTTGTCCCTG | 7870 |
| Usf1 | GAGGGTGATGATAGGAAGGA | 7871 |
| Usf1 | GACCTGTCGGACCTGAACTA | 7872 |
| Usf2 | GGCCACCAACTAATAGAGAC | 7873 |
| Usf2 | GTCTGTCTTTGGTGACGGCC | 7874 |
| Usf2 | GGTCCTATACTATATGGAGA | 7875 |
| Usf2 | GAGTCCCAGAACATGGGAGC | 7876 |
| Usf2 | GGGAGGACGCATGGGAATCA | 7877 |
| Usf2 | GGAATCATGGCAGGCGGAGG | 7878 |
| Usf2 | GAGGCCCAATCCATACATGG | 7879 |
| Usf2 | GTATAGGAGCCCGGAGGTTG | 7880 |
| Usf2 | GCCCTCTCCGTCCACTACTT | 7881 |
| Usf2 | GCCAGCAGCATAAACTGGGA | 7882 |
| Utf1 | GTTGCCTAAAGTGTCCGAAC | 7883 |
| Utf1 | GAACCTCACCTAGGATCTCC | 7884 |
| Utf1 | GAGGAACTAGGTAGGCGAGG | 7885 |
| Utf1 | GAACCTTACATCTCAGGTCC | 7886 |
| Utf1 | GTGATGGGATCTGGTGGCTC | 7887 |
| Utf1 | GGACAGATGCATTAGAGGTG | 7888 |
| Utf1 | GGGCTTTGGCTCACTGGGAA | 7889 |
| Utf1 | GCCAATCAGTAGAAACTGGT | 7890 |
| Utf1 | GTAAGCGGGACTGAGAGCCC | 7891 |
| Vav1 | GGGCACAAGTGCAAAGGCCC | 7892 |
| Vav1 | GAATTGTCTTGGTTTACCGT | 7893 |
| Vav1 | GCAATACTACGTTTATTCAA | 7894 |
| Vav1 | GCAGTTAGGGTAGGAAGGCC | 7895 |
| Vav1 | GCGGCGCTAAACGGCTTCAC | 7896 |
| Vav1 | GGCACAAGTGCAAAGGCCCT | 7897 |
| Vav1 | GGCCTCTAGGCGGCGCTAAA | 7898 |
| Vav1 | GACAGTTACAGTCACAGAAG | 7899 |
| Vav1 | GTTAGAGGAAGTCGAGGGTT | 7900 |
| Vax1 | GGATTCCTGAGGCTTCGGAT | 7901 |
| Vax1 | GTTGAGTGATGTTCACTGAG | 7902 |
| Vax1 | GGAGTTGACTTTATATGATT | 7903 |
| Vax1 | GTCCTCTGGGAAACCTGTCA | 7904 |
| Vax1 | GGTGTGTTAAGGAGTCGCTT | 7905 |
| Vax1 | GCTACCTGATCGCCAGGCTG | 7906 |
| Vax1 | GAACTAAGTCAGAGCCGACC | 7907 |
| Vax1 | GGAGGTGACAGCCGGACTGT | 7908 |
| Vax1 | GCTCACATACTGGCTAAAGG | 7909 |
| Vax1 | GTTGTGGTTGTCCGACACCC | 7910 |
| Vax2 | GCTTCTGTTTAGACAGTGTC | 7911 |
| Vax2 | GAGTGACAACCTCAGAGCTG | 7912 |
| Vax2 | GCCAGTGAGTGCCACAGTCA | 7913 |
| Vax2 | GACACCCGCTACCAGATCTT | 7914 |
| Vax2 | GTGCCTGAGTGTGAGTGCCT | 7915 |
| Vax2 | GGTGTTTAGAGCCTGGCAAT | 7916 |
| Vax2 | GCTTGCTGCTTCCCTCTTGC | 7917 |
| Vax2 | GATGGATGAGGTTGGAAGAG | 7918 |
| Vax2 | GAGAAATTACAACACAAAGG | 7919 |
| Vdr | GTTCTCAACAGCCAACACTT | 7920 |
| Vdr | GACGGTAGTGGAAACATTCT | 7921 |
| Vdr | GAAGCTACAGCAAGGCTTGC | 7922 |
| Vdr | GAGGCAGTGTGAAATGATGG | 7923 |
| Vdr | GGTGAGAAACCCTGGGCTAG | 7924 |
| Vdr | GTCCCGGGTCAACTCAGGTA | 7925 |
| Vdr | GTTAGAAGGTGAGAAACCCT | 7926 |
| Vdr | GACCTCACACATACCTGGGT | 7927 |
| Vdr | GTATATGTTCCTCTAGCCCA | 7928 |
| Vdr | GTTGCCGGGAGATGGTGGAA | 7929 |
| Vezf1 | GTGGTCTTCCAATTTGAGCA | 7930 |
| Vezf1 | GGACTTGTCCTCATCACCCA | 7931 |
| Vezf1 | GAAGGGAATCTTCTAAGGCA | 7932 |
| Vezf1 | GGAAGCTGACTTGTTTGGGA | 7933 |
| Vezf1 | GATGGCAAGAGCGCTGAGTG | 7934 |
| Vezf1 | GAATAGAAACTGAAGAGGTA | 7935 |
| Vezf1 | GGAATATAATCAAACCAAGC | 7936 |
| Vezf1 | GTTATAACACTTCAGGTGGA | 7937 |
| Vezf1 | GCACACACAAGTCAGACTTC | 7938 |
| Vsx1 | GCCTTCCACAGAACCAGGCT | 7939 |
| Vsx1 | GCAAGCCAGTAACTTTCCTT | 7940 |
| Vsx1 | GCAAGGGAGATGCGCTGTGT | 7941 |
| Vsx1 | GTCTTTATCCACCCAGAGGT | 7942 |
| Vsx1 | GGCTATCTGTCCGCCTGATT | 7943 |
| Vsx1 | GGCTGCCAACACACCAGGGT | 7944 |
| Vsx1 | GGACAGCTGGAGAGAGAAAG | 7945 |
| Vsx1 | GGGACAGCTGGAGAGAGAAA | 7946 |
| Vsxl | GAACCGTCCCTAGATCTTAC | 7947 |
| Vsx2 | GTCGCAGCTAACCTAGGCAC | 7948 |
| Vsx2 | GAGCTGAACAGCCAATCACC | 7949 |
| Vsx2 | GCTTCTCCAGAGGCTCTAGA | 7950 |
| Vsx2 | GCAACAAGGAGCTAAACTGA | 7951 |
| VSx2 | GAACATAATGTCCCGTGCTG | 7952 |
| Vsx2 | GGTGGTGGAGTAAGGAGGAC | 7953 |
| Vsx2 | GGTTAGCTGCGACAGATCCC | 7954 |
| Vsx2 | GAGGCTGCTTAGTTAAGGGA | 7955 |
| Vsx2 | GGGTTAGGATCGAGCCCTCG | 7956 |
| Vsx2 | GCTAGTCACTTTGAGCAGAA | 7957 |
| Wt1 | GTTATCCTTTCTGAGGCCCG | 7958 |
| Wt1 | GAGAACTCTCCTGGGTTCTG | 7959 |
| Wt1 | GCGCCTTGTTGAGAAGAAAC | 7960 |
| Wt1 | GCTGTTTGGAATCTTGGAAC | 7961 |
| Wt1 | GACGCCTTGCTACACTGACT | 7962 |
| Wt1 | GGCTGTTAATCAGGAAGGGT | 7963 |
| Wt1 | GAGCAATTGCCGGTTCCTCT | 7964 |
| Wt1 | GTTTCATTACCAAAGGAAAG | 7965 |
| Wt1 | GCAAATAACTTTCTGAGCCT | 7966 |
| Wt1 | GCTGGTGGCAGTCAGGCATC | 7967 |
| Xbp1 | CCCATGTGCCAAGCACGGAG | 7968 |
| Xbp1 | GCCTTGGCTAGCATGTAGTA | 7969 |
| Xbp1 | GTCACGCAGGAGGCTAGAAC | 7970 |
| Xbp1 | GGACAAAGCCCAAGATGCAG | 7971 |
| Xbp1 | GCATGTGCCAAGCACGGAGT | 7972 |
| Xbp1 | GTGCTAGAGCATTAGGTTCT | 7973 |
| Xbp1 | GTATTCCTTTCATTAGGGAA | 7974 |
| Xbp1 | GGAGGAGAGCCAGGCTCATT | 7975 |
| Ybx1 | GGAATAAACGTTAACTGCTG | 7976 |
| Ybx1 | GGTGGTGACATTACAGGCAA | 7977 |
| Ybx1 | GCCTATTGGCTCACGCTCCG | 7978 |
| Ybx1 | GGCTGCAGAGAGAGAAGGGA | 7979 |
| Ybx1 | GGCCTGAGAAGCTGTGGGTC | 7980 |
| Ybx1 | GGTGATCCAGTCACCTTGGA | 7981 |
| Ybx1 | GAGAGAAGGGATGGGAGTGG | 7982 |
| Ybx1 | GTGCTCACCCAACCAAGAAG | 7983 |
| Ybx1 | GGCGAATCTCCTCACAATTC | 7984 |
| Yy1 | GGAGTTGTTAGTGTTGAGGC | 7985 |
| Yy1 | GCCTGTTGGAACGAAGGGTC | 7986 |
| Yy1 | GCTTCATCTGTTGAATATTC | 7987 |
| Yy1 | GCAATTTGATGATTTGAACA | 7988 |
| Yy1 | GTTCATACAGTGTCTTTCAA | 7989 |
| Yy1 | GTGTGCTGCCACGGGCTCTT | 7990 |
| Yy1 | GGACCCTGGTTGGGAGTAGG | 7991 |
| Yy1 | GCCAGACCCTTCGTTCCAAC | 7992 |
| Yy1 | GTATGAATGTGGGAAGGCTG | 7993 |
| Yy1 | GGAGTTGGTATTTGTGTGGA | 7994 |
| Zbtb12 | GGCAGCAGTGATCCTAAGAT | 7995 |
| Zbtb12 | GACAAATAATCCUGGCCAAA | 7996 |
| Zbtb12 | GACAAGCTGAGGGCAAGCGC | 7997 |
| Zbtb12 | GGACAAATAATCCTGGCCAA | 7998 |
| Zbtb12 | GCAGTGATCCTAAGATTGGT | 7999 |
| Zbtb12 | GGAAGAATGCATATTTCACT | 8000 |
| Zbtb12 | GGATTGAGAAGCTTCCTGGA | 8001 |
| Zbtb14 | GCAGCAGAGGAAGTGGTGAC | 8002 |
| Zbtb14 | GGTTGACTCTTGCTATCAGC | 8003 |
| Zbtb14 | GGATGCCTAAGTAAACATGA | 8004 |
| Zbtb14 | GGTTGCTTTCCCTGGGTCTA | 8005 |
| Zbtb14 | GAGAAGTGGAGGATGGTGGA | 8006 |
| Zbtb14 | GTGTGTGCTCGTGCAGGAGG | 8007 |
| Zbtb14 | GCAGTAGTTAATAGGGATCA | 8008 |
| Zbtb14 | GCCACTGAGGCATTGTTTAT | 8009 |
| Zbtb14 | GCTGGTCCTTGCTTATCATC | 8010 |
| Zbtb16 | GCGCTCTTGAGTACTGGAGT | 8011 |
| Zbtb16 | GAACTTTCCATCCAGGTTCC | 8012 |
| Zbtb16 | GGAATCAAGATACGATTCTG | 8013 |
| Zbtb16 | GTGGTCAGGCATCAGAGGCC | 8014 |
| Zbtb16 | GGGATACACCGCATGCCCAG | 8015 |
| Zbtb16 | GGCCAGCCTTCATCGCTAAG | 8016 |
| Zbtb16 | GGAGGAGACGGTGCTTTCCG | 8017 |
| Zbtb16 | GCTAGATGTCAGGAGAAGCC | 8018 |
| Zbtb16 | GAGTAATGCCTAGATTTAAG | 8019 |
| Zbtb16 | GCTTACGGAGCCTGGAGCTT | 8020 |
| Zbtb18 | GAGCAGGAAGACAAGCTGTG | 8021 |
| Zbtb18 | GCTCTGACATCATGTTCAGA | 8022 |
| Zbtb18 | GGGTGTGTGTGTGAGGTTCA | 8023 |
| Zbtb18 | GTCTGCCATTATCTCCGCAG | 8024 |
| Zbtb18 | GTAAACTGGGTGATTAATGT | 8052 |
| Zbtb18 | GCCCGAAGACATCCACTCCA | 8026 |
| Zbtb18 | GCAGACGGCGACTGTTGGGT | 8027 |
| Zbtb18 | GTTGTGATCACCAGGAGGGT | 8028 |
| Zbtb18 | GCCATATGGCCACAGTCAGC | 8029 |
| Zbtb20 | GGTCGTTGAACTGCTCGATT | 8030 |
| Zbtb20 | GCACCTAAGTGTGGCTCAGA | 8031 |
| Zbtb20 | GGGCGACTGAAGACCAAGTG | 8032 |
| Zbtb20 | GATGCCTGCTGGTCAGACCT | 8033 |
| Zbtb20 | GAGAGGGACAGAGGGAGGAC | 8034 |
| Zatb20 | GCCTGTTCCTCTATGAGGTA | 8035 |
| Zbtb20 | GACAGGCTGATCAGACTGCC | 8036 |
| Zbtb20 | GGCCTAGATCTTTCCAATCA | 8037 |
| Zbtb20 | GTTGCTTGTCCGAGTCTTCC | 8038 |
| Zbtb20 | GAGTGACAGAGACAGAGAAA | 8039 |
| Xbtb3 | GCTTGAGCCAATTAAGATAG | 8040 |
| Zbtb3 | GGTGGAGAATGACTTAGGGA | 8041 |
| Zbtb3 | GCAATTAGGGAACTGGTTGA | 8042 |
| Zbtb3 | GGCTACAGGAACATTATGCT | 8043 |
| Zbtb3 | GTCATGTGCAATTAGGGAAC | 8044 |
| Zbtb3 | GCCAATTAAGATAGCGGAGG | 8045 |
| Zbtb3 | GTCAGCAAGCACAGCTGAGG | 8046 |
| Zbtb3 | GGGAAATTACCCGCCTGGGT | 8047 |
| Zbtb32 | GATCAGACAGGGTGTGTCGG | 8048 |
| Zbtb32 | GGAAGGcATCCTAGGTCTGG | 8049 |
| Zbtb32 | GTTGTAGCGGGAAAGGCACT | 8050 |
| Zbtb32 | GTGGGTGAAGCATACTAGTG | 8051 |
| Zbtb32 | GAAGCTAGGGAGAAACCTCA | 8052 |
| Zbtb32 | GGAGAGCATTATGAGAGGTG | 8053 |
| Zbtb32 | GAGGGATAAAGGCAACTACA | 8054 |
| Zbtb32 | GCACCCAAGCTAGAATCGGA | 8055 |
| Zbtb32 | GAAGAGTAATCACAGACACT | 8056 |
| Zbtb32 | GCGACCCTCCTAGATCAGAC | 8057 |
| Zbtb33 | GGAAGCCGCTTTGACGTCGG | 8058 |
| Zbtb33 | GCCACTCCTAACAGTGTCAT | 8059 |
| Zbtb33 | GCAGTCACGGAAAGAGCCGA | 8060 |
| Zbtb33 | GTCACGGACAGAGCCGAAGG | 8061 |
| Zbtb33 | GCTTTGACGTCGGCGGAAAC | 8062 |
| Zbtb5 | GCCTGTGGAGGCGGTGACAT | 8063 |
| Zbtb5 | GATCTAGGTATAGTGGTGTA | 8064 |
| Zbtb5 | GTTGTTCTCTGTTGTGAGTG | 8065 |
| Zbtb5 | GTCTCCGCTTTGATGTTTAT | 8066 |
| Zbtb5 | GATTGGCCATTGGAGGCCTG | 8067 |
| Zbtb5 | GTGATTGGTCAGAGCGCTCA | 8068 |
| Zbtb5 | GTTCTAGTTCTGAGTTAACC | 8069 |
| Zbtb5 | GAGTTGTTGAAGCTGGTGAA | 8070 |
| Zbtb5 | GTTAATCTGGAAAGGAAACT | 8071 |
| Zbtb5 | GAGAGAATGTCAGGAGCTAA | 8072 |
| Zbtb7a | GTAATTTAAGGCGCAGATGG | 8073 |
| Zbtb7a | GGTAATTTAAGGCGCAGATG | 8074 |
| Zbtb7a | GAGTAAACTGAGGTTTATGT | 8075 |
| Zbtb7a | GACTCCTCTTCGGCTCTGGC | 8076 |
| Zbtb7a | GTCGTGGGAGAGGTCTGGAG | 8077 |
| Zbtb7a | GATGCTCGCGACTCCCTTCC | 8078 |
| Zbtb7a | GGGAGTCGCGAGCATCATAC | 8079 |
| Zbtb7a | GCGAAAGAACTACAGAGCCC | 8080 |
| Zbtb7a | GGAGAGGTCTGGAGAGGGAG | 8081 |
| Zbtb7a | GGTTTGTCCGAGGGCAAGAG | 8082 |
| Zbtb7b | GACAAGAGCTGGCTGAGGAG | 8083 |
| Zbtb7b | GTGTATATGGGATTGATATG | 8084 |
| Zbtb7b | GTGAAGTCAAGGTAAGGGCA | 8085 |
| Zbtb7b | GGCTTAAGGACAGGGTCTTG | 8086 |
| Zbtb7b | GTGGCATTGGCAGGACTGGA | 8087 |
| Zbtb7b | GTCCTTATTGGGCGGAGGGA | 8088 |
| 2btb7b | GGAAAGTTCTGAGATGAACT | 8089 |
| Zbtb7b | GCAGACTGCTCAGGIGGAGG | 8090 |
| Zbtb7b | GACCCTGACAGTAGAAGGAA | 8091 |
| Zbtb7b | GGGCAGAGACCTTAGGAGGT | 8092 |
| Zc3h11a | GGGACCGGAATTTCTTTCTG | 8093 |
| Zc3h11a | GGCATAAGAGCTGGAATGAG | 8094 |
| Zc3h11a | GTCACGTGTCACGGAGGCAC | 8095 |
| Zc3h11a | GTGGCATAAGAGCTGGAATC | 8096 |
| Zc3h11a | GGAATTTCTTTCTGTGGACC | 8097 |
| Zc3h11a | GCATTATCCCTTAGATGCCA | 8098 |
| Zc3h11a | GGGTATGTTCCTTGTCCATA | 8099 |
| Zc3h11a | GGATGGAATTGAGGCATACA | 8100 |
| Zc3h11a | GGTCATAGGGTCACGTGTCA | 8101 |
| Zeb1 | GAAGGAACTAAGTTTCTTCT | 8102 |
| Zeb1 | GTGACAGGTGATCTAGGCGC | 8103 |
| Zeb1 | GCTCAGGTGTGGTGGAGTAG | 8104 |
| Zeb1 | GGAACCTTGTTGCTAGGGCC | 8105 |
| Zeb1 | GCCAGGTACTCAAGATGCCA | 8106 |
| Zeb1 | GAGTCTGCCATACCCAAGGA | 8107 |
| Zeb1 | GAGCAGTTGTCGCACTGGGA | 8108 |
| Zeb1 | GGAGTAGCGGAGAATAGTGC | 8109 |
| Zeb1 | GGAGAGCTTACGGTCTAGAA | 8110 |
| Zeb1 | GTAAGACTGGCTTACAAGTC | 8111 |
| 2eb2 | GAGATCAGTTCTAACCTGCT | 8112 |
| Zeb2 | GTATGAGGGAATGCACACGG | 8113 |
| Zeb2 | GTGCACACCATTCACAGAAC | 8114 |
| Zeb2 | GTAATCCAATCAGGTTACAT | 8115 |
| Zeb2 | GGCGGCAGAGAAAGGGTTAA | 8116 |
| Zeb2 | GTACTATGCTGGCCAATCTC | 8117 |
| Zeb2 | GGGTGACACTAAACTGTGTG | 8118 |
| Zeb2 | GTGGTACAGGGAAGATCGCG | 8119 |
| Zeb2 | GTCTCATTGTGCCTTTGCAC | 8120 |
| Zeb2 | GCAGGCACCCAGGTAGCTAC | 8121 |
| Zfhx3 | GGCAGCCTGAAGCAGGTCTA | 8122 |
| Zfhx3 | GGTAACAGACTGCGCCCAAC | 8123 |
| Zfhx3 | GAGACTGATGGATCAGGGTT | 8124 |
| Zfhx3 | GCCTGCACCAACCCAGGAAC | 8125 |
| Zfhx3 | GAAATGGTCTGTGGCTCCTA | 8126 |
| Zfhx3 | GCTGGCATGCTGACATCCTC | 8127 |
| Zfhx3 | GTGGATTTCGGAGAAATTGA | 8128 |
| Zfhx3 | GGGCACTTCTAGGTCTCCCA | 8129 |
| Zfhx3 | GGACTTTAGCCAATGTGGAC | 8130 |
| Zfp105 | GGAGAAAGCATTCAAGTGTG | 8131 |
| Zfp105 | GTCCACAGTCTTTGCGCTCA | 8132 |
| Zfp105 | GCCTGTGAGTGCAGTGAGTG | 8133 |
| Zfp105 | GTATTGTGAAACTCATTTGG | 8134 |
| Zfp105 | GTCGTACACCTCGGTGCCCA | 8135 |
| Zfp105 | GTTCAGTAAGGTTTCTGTGT | 8136 |
| Zfp105 | GAAATGATAAACCCAGAGGA | 8137 |
| Zfp105 | GAAGGCAGCGCCCTTTACTC | 8138 |
| Zfp148 | GCGTTGCATATTGAGGTTAG | 8139 |
| Zfp148 | GAGCTGGGAAAGCCACTGAG | 8140 |
| Zfp148 | GAGGGCGCTCCTAAGAAACC | 8141 |
| 2fp148 | GCCAGAATCAAAGCCACGCT | 8142 |
| Zfp148 | GACTCAAGAATTACAGTTTC | 8143 |
| Zfp148 | GCAAACCGCGATGCAGGATG | 8144 |
| Zfp148 | GACTTCGTTGGCCCAAACCA | 8145 |
| Zfp148 | GGTGCCCACATCCTGCATCG | 8146 |
| Zfp148 | GGAAGAAATTTAAGATGGAA | 8147 |
| Zfp2 | GGACTAGTTGGGAAGGATGG | 8148 |
| Zfp2 | GCACATGAATGAGGGTCGCT | 8149 |
| Zfp2 | GGGCATAGTGGACACCAAAG | 8150 |
| Zfp2 | GTACCTTGGTTCCCTATCCT | 8151 |
| Zfp2 | GCAACTGGAAGCCCTGTCGA | 8152 |
| 2fp2 | GAAGGACTAGTTGGGAAGGA | 8153 |
| Zfp2 | GAAGCCCTGTCGAGGGCTCA | 8154 |
| Zfp2 | GTTCCGAACCAAATGTCGGA | 8155 |
| Zfp2 | GGCTGTTAGGCCTCTGCCAT | 8156 |
| Zfp2 | GCCATTGCCTTCCTCCTTCC | 8157 |
| Zfp239 | GAAAGTGATACCATACATAT | 8158 |
| Zfp239 | GGCCAACCACAACCTCAAAC | 8159 |
| Zfp239 | GCCAACCACAACCTCAAACT | 8160 |
| Zfp239 | GGGCTTTCACAACGTTCCTG | 8161 |
| Zfp239 | GCTAAGTTTCACTTACCAAC | 8162 |
| Zfp239 | GAGCTCACTTCCGGCGACGA | 8163 |
| Zfp239 | GGACCATGTGGGCTACAGAT | 8164 |
| Zfp239 | GCAGAAACTAGTAACAGAAT | 8165 |
| Zfp239 | GCTACTTCCGAGCTCACTTC | 8166 |
| Zfp281 | GTGATTGGTGGCCCTGCTGA | 8167 |
| Zfp281 | GTTGTTCCTTATTCAGTTGG | 8168 |
| Zfp281 | GGCTAGCCAGGCGGAAACTG | 8169 |
| Zfp281 | GCGTGAATGAGAGAAATGAC | 8170 |
| Zfp281 | GCCCAAGCATGAAGGGCAGT | 8171 |
| Ztp281 | GTTACGAGTTTAAAGCTTTC | 8172 |
| Zfp281 | GCTCAAGGTACGACTTCTAA | 8173 |
| Zfp281 | GACAGTGGCTGAGGGTTTCT | 8174 |
| Zfp281 | GGTCCTGTGAACTAAATCTA | 8175 |
| Zfp35 | GACTCCCAGCTTTAGCATAG | 8176 |
| Zfp35 | GAAGCAGTGCCCAGACCACT | 8177 |
| Zfp35 | GCTAACCTGCCAAGTGGTCT | 8178 |
| Zfp35 | GGTCACGAAGAGCTAATAAC | 8179 |
| Zfp35 | GCCAGGTCTCATCACGGTCT | 8180 |
| Zfp35 | GACTCCGAGAGAAGGGTGCA | 8181 |
| Zfp35 | GGTAAATGAAGAAGCTCAGG | 8182 |
| Zfp35 | GCTGGTAAATGAAGAAGCTC | 8183 |
| Zfp35 | GCAGGGAAGAAGGGAAAGGG | 8184 |
| Zfp36 | GGATAGAAGACGGTTTAAGC | 8185 |
| Zfp36 | GGGCTACTCTCTAAAGGATG | 8186 |
| Zfp36 | GAGCCAAGGCACAAGGTGTG | 8187 |
| Zfp36 | GCTTCCTGGAAGCCGTGACG | 8188 |
| Zfp36 | GGTCTAAGACTTAAAGATCT | 8189 |
| Zfp36 | GGTTGTGTACGACCAACTGG | 8190 |
| Zfp36 | GTGCGTTGCGTATCGAGGTA | 8191 |
| Zfp36 | GGCAGTCGGGAAGAGAACTG | 8192 |
| Zfp36 | GACTCAGCAGATAGAGGAGG | 8193 |
| Zfp384 | GAAGGAAGGAGCCGAGGGAG | 8194 |
| Zfp384 | GCGGCAGCAGGAAAGGAAAG | 8195 |
| Zfp384 | GTGGGAGGATGGAAGCTAGA | 8196 |
| Zfp384 | GCTACCTTCACTAATCTGCT | 8197 |
| Zfp384 | GGCTTCCGGAAGAGACCTCT | 8198 |
| Zfp384 | GCTGCCTTCACGTCCGGTTT | 8199 |
| Zfp384 | GAGAGCCGCTCGAGCACATC | 8200 |
| Zfp384 | GTCACAGTCTTAAGAGAGGT | 8201 |
| Zfp384 | GTGAAGGCAGCGTGTGTTAA | 8202 |
| Zfp410 | GAACACTGATCAGTACTCTA | 8203 |
| Zfp410 | GTTGTGGGAAGGTACCATTG | 8204 |
| Zfp410 | GAGAAGATAAATGAGTGGTT | 8205 |
| Zfp410 | GGTAGCTTTCTCCGGAGCTG | 8206 |
| Zfp410 | GGTCCGCGAAATCTGAAACC | 8207 |
| Zfp410 | GCATAAGTACATAGGATTTC | 8208 |
| Zfp410 | GAAATGTTCATGGCCCAAAG | 8209 |
| Zfp410 | GTGGCAAGGAGATGTTTACT | 8210 |
| 2fp410 | GCATTCCAGTCCATGATGAC | 8211 |
| Zfp42 | GTTTCCTTTCACCTACAATT | 8212 |
| Zfp42 | GGAGTAACTAACTCCGAGCT | 8213 |
| Zfp42 | GAGTCTCAAGGCCAGGCGAT | 8214 |
| Zfp42 | GCATTCCAGCCTACCCAGCT | 8215 |
| Zfp42 | GCCTGGACAAGGATTCACGT | 8216 |
| Zfp42 | GTACAATCTTGTCCTAGGTA | 8217 |
| Zfp42 | GGAATGAGACCTACCAAAGG | 8218 |
| Zfp42 | GTGAATCCTTGTCCAGGCCC | 8219 |
| Zfp42 | GTAGCCTTCAGCAAATTTCG | 8220 |
| Zfp42 | GAATCCTTGTCCAGGCCCTG | 8221 |
| Zfp423 | GCTGGACATCTCTAGGCCGT | 8222 |
| Zfp423 | GGGAGGGAAATGGTCAGGGA | 8223 |
| Zfp423 | GGCTCGGATCAGACGGAGAG | 8224 |
| Zfp423 | GCTTGGGCTCTGACAGCACT | 8225 |
| Zfp423 | GCCTAGGGATGACTGATCCC | 8226 |
| Zfp423 | GTCCATGGAGGCAGCTAGCG | 8227 |
| Zfp423 | GGAAGGGAGGGAAATGGTCA | 8228 |
| Zfp423 | GCCTGCCTCTTTCCACCCTC | 8229 |
| Zfp423 | GCTGCCTCTCCTAGGTGGAG | 8230 |
| Zfp423 | GGCCTCAAAGGGCAGTTTAG | 8231 |
| Zfp628 | GTTCGCCAGATGCAGAATCC | 8232 |
| Zfp628 | GTCATGACGCACGAAGGCGG | 8233 |
| Zfp691 | GGCCTTGAAGGCTGATGTTT | 8234 |
| Zfp691 | GACTCTAAAGACACGGTGTG | 8235 |
| Zfp691 | GGCGGATCCTCTCTGGGTTC | 8236 |
| Zfp691 | GTCAAATCTAATAGTCTTGT | 8236 |
| Zfp691 | GTAGGACGGCCAATAAACAT | 8238 |
| Zfp691 | GGAATGACCTCCAGCCAGGT | 8239 |
| Zfp691 | GGTTTAGTGCGCGGCATGCT | 8240 |
| Zfp691 | GCAGGGAGGGTAGTAAGACT | 8241 |
| Zfp691 | GAATTCAATAATCTCTGACC | 8242 |
| Zfp740 | GTTTGGCTAGGTCAAGACTG | 8243 |
| Zfp740 | GAGGGCAGAACTGTGTTGGA | 8244 |
| Zfp740 | GTACTGAGTGTTCTTTGAGA | 8245 |
| Zfp740 | GACTATTCTAAGTGCACACT | 8246 |
| Zfp740 | GAGCTGGGATTTGCCATCTT | 8247 |
| Zfp740 | GGGCGCTAGTATTCGAGGAT | 8248 |
| Zfp740 | GAACTGTCCCGGCTTCTCTT | 8249 |
| Zfp740 | GGTTCGTAAATTCGCCGCCG | 8250 |
| Zfp740 | GGGCCGAAAGAGCAGCCAAC | 8251 |
| Zfp740 | GTGGGACTTGTTGGAATTCA | 8252 |
| Zfpm1 | GGCTTAGGGTCTGGGAGTCC | 8253 |
| Zfpm1 | GGTGGAAGATAGAGAAAGGA | 8254 |
| Zfpm1 | GTTCATGACCAGAGCCAGCA | 8255 |
| Zfpm1 | GGACCCTGTGTAGGTCTCAA | 8256 |
| Zfpm1 | GCTGGCATATGGTGAGAGGC | 8257 |
| Zfpm1 | GTCTATCTAGAAACGAGGGT | 8258 |
| Zfpm1 | GCTGAGGATTGGACAGACGT | 8259 |
| Zfpm1 | GCCTTTCAGGGAGCCAGCAG | 8260 |
| Zfpm1 | GCCACAGTGAACATCTGCCA | 8261 |
| Zfpm1 | GGGACAGGGTCGACGAAAGG | 8262 |
| Zfx | GCCGTAAATGTGTGTGTGTG | 8263 |
| Zfx | GTAATCTTCAGCACACTAAA | 8264 |
| Zfx | GGATAAAGCAAATTGCAAAC | 8265 |
| Zfx | GTGACGTGACGTGCTGACGG | 8266 |
| Zfx | GGGCGCTGTCACGGAAACTC | 8267 |
| Zfx | GCTCTGGAAACTGAAAGGAA | 8268 |
| Zfx | GGAAATTCGGGCTATGATAC | 8269 |
| Zhx1 | GAGGAGCCGAGAGTGACAGT | 8270 |
| Zhx1 | GAGCGCGGGACTGTTGACAG | 8271 |
| Zhx1 | GCTGACTTTGAAAGCTTGTT | 8272 |
| Zhx1 | GTGCAAGGATGCCAGATAAT | 8273 |
| Zhx1 | GCCGAGCAATCGCTTGAACG | 8274 |
| Zhx1 | GACTCTCCCTGACAGAGGGC | 8275 |
| Zhx1 | GCCCTTGTGGGTTCAGGGAG | 8276 |
| Zhx1 | GCACTCTGCATTTACATGAA | 8277 |
| Zhx1 | GGCTTCTAGTGACAGAGGCG | 8278 |
| Zhx1 | GAGGGCTGAAGGGCAGAGGT | 8279 |
| Zic1 | GGAAGGGTGGCTGTTGGGAG | 8280 |
| Zic1 | GTCTCCGAGAGCAGCAGTTG | 8281 |
| Zic1 | GTTAGGAAGTAGAAATTCTA | 8282 |
| Zic1 | GTTAAGCATCTATGCCTGTG | 8283 |
| Zic1 | GGGCAAAGACAGGTTAATCG | 8284 |
| Zic1 | GTCAAGCGCTTTACAATACC | 8285 |
| Zic1 | GGTGGGAGCAAGCCACACAA | 8286 |
| Zic1 | GCGAGTGTTGTATGTTTGCA | 8287 |
| Zic1 | GGGCAGAGTGAGCGAGTTGG | 8288 |
| Zic2 | GCCGCGTTGACTTCATTCGG | 8289 |
| Zic2 | GCACACAAGCTGGCAGGGAG | 8290 |
| Zic2 | GAACCAATGTGGCTGTGGAC | 8291 |
| Zic2 | GTTTATTTCGGTGGGCGCTG | 8292 |
| Zic2 | GAACTCTTGAATTAGCCGGC | 8293 |
| Zic2 | GGGAGCCTTGGTAGAAAGGT | 8294 |
| Zic2 | GGCCGAGCCTTGGATAAGGA | 8295 |
| Zic2 | GGGTTGTGCAGCTGCAGCAG | 8296 |
| Zic2 | GCCCAGTCTATGGGTGCGTT | 8297 |
| Zic2 | GCTTGGTGACTCTATAGCTA | 8298 |
| Zic3 | GCTTGCTGCCGGCTTAGAGC | 8299 |
| Zic3 | GGCAAAGCACTAGCAAAGGG | 8300 |
| Zic3 | GCAAAGCCCGGGATGTTAAG | 8301 |
| Zic3 | GTGGACAGCTACCTCTAGTT | 8302 |
| Zic3 | GCAGCGCGAAGCGGAGAACA | 8303 |
| Zic3 | GAGAAGTGGGAAGGTGGGAA | 8304 |
| Zic3 | GCCCTGACTCTTAGTCGCGA | 8305 |
| Zic3 | GGTGGGAGTTTCCATATTTG | 8306 |
| Zic3 | GAGTCTCGAACGCAGGGCAA | 8307 |
| Zic3 | GCAACGACAAGTATCTTCTT | 8308 |
| Zscan26 | GTAAAGCCAGAGGAGGAAAC | 8309 |
| Zscan26 | GGGAGGACCAGGACTCAACT | 8310 |
| Zscan26 | GCAGGGCCCAAATCTGTCAG | 8311 |
| Zscan26 | GTAGGATGTCAAAGACTTGC | 8312 |
| Zscan26 | GTGACTAACAGTTAGACAAA | 8313 |
| Zscan26 | GCTTGAGAAGGTAAAGCCAG | 8314 |
| Zscan26 | GATTGGATGGCCTGAGGATG | 8315 |
| Zscan26 | GGAGCCGGAAACTACTGGGC | 8316 |
| Zscan26 | GAGACTTTAAACCATTTACC | 8317 |

[0326] All publications and patents mentioned in the above specification are herein incorporated by reference as if expressly set forth herein. Various modifications and variations of the described method and system of the disclosure will be apparent to those skilled in the art without departing from the scope and spirit of the disclosure. Although the disclosure has been described in connection with specific preferred embodiments, it should be understood that the disclosure as claimed should not be unduly limited to such specific embodiments. Indeed, various modifications of the described modes for carrying out the disclosure that are obvious to those skilled in relevant fields are intended to be within the scope of the following claims.

1-20. (canceled)

21. A method for converting cell fate of a population of cells, the method comprising:
regulating an expression level of a first endogenous gene and an expression level of a second endogenous gene in the population of cells, via using (i) a CRISPR-Cas protein, (ii) a first guide ribonucleic acid molecule (first guide RNA) exhibiting specific binding to the first endogenous gene, and (iii) a second guide ribonucleic acid molecule (second guide RNA) exhibiting specific binding to the second endogenous gene, wherein the first endogenous gene and the second endogenous gene are different,
wherein the regulating synergistically yields a greater degree of conversion of the cell fate of the population of cells, as compared to that from regulating an expression level of only one of the first endogenous gene and the second endogenous gene.

22. The method of claim 21, wherein the regulating induces expression of a cellular marker indicative of the conversion in the population of cells.

23. The method of claim 22, wherein, upon the regulating, at least 50% of the population is positive for the cellular marker.

24. The method of claim 22, wherein a portion of the population of cells positive for the cellular marker is greater than a sum of (i) a portion of a first control population of cells subjected to regulation of the expression of the first endogenous gene but not that of the second endogenous gene and (ii) a portion of a second control population of cells subjected to regulation of the expression of the second endogenous gene but not that of the first endogenous gene.

25. The method of claim 21, wherein the population of cells is contacted by the first guide RNA and the second guide RNA substantially simultaneously.

26. The method of claim 21, wherein the CRISPR-Cas protein is a nuclease dead CRISPR-Cas protein.

27. The method of claim 21, wherein the CRISPR-Cas protein is CRISPR-Cas9.

28. The method of claim 21, wherein the CRISPR-Cas protein is fused to a gene activator.

29. The method of claim 21, wherein the CRISPR-Cas protein is fused to a gene repressor.

30. The method of claim 21, wherein the first endogenous gene or the second endogenous gene is a non-coding gene.

31. The method of claim 21, wherein the first endogenous gene or the second endogenous gene is a transcription factor.

32. The method of claim 21, wherein the first endogenous gene or the second endogenous gene is a cell differentiation factor.

33. The method of claim 21, wherein at least one of the first guide RNA and the second guide RNA is substantially free of a RNA homopolymer sequence having a length greater than 3 nucleotides.

34. The method of claim 21, wherein at least one of the first guide RNA and the second guide RNA exhibits less than 2 mismatches with a different genomic sequence of the population of cells.

35. The method of claim 21, wherein at least one of the first guide RNA and the second guide RNA comprises a GC content of at least about 30%.

36. The method of claim 21, wherein at least one of the first guide RNA and the second guide RNA comprises a GC content of at most about 70%.

37. The method of claim 21, wherein at least one of the first guide RNA and the second guide RNA comprises a GC content of between about 30% and about 70%.

38. The method of claim 21, wherein the population of cells comprises mammalian cells.

39. The method of claim 21, wherein the population of cells comprises stem cells.

40. The method of claim 21, wherein the conversion comprises a change of cell type in the population of cells.

The application's sequence listing, which the Patent Office published only in electronic form, follows.

SEQUENCE LISTING (8317 sequences)

SEQ ID NO: 1 - DNA, 20 bp, Artificial Sequence
  Synthetic
gtgggtggcggtggaagtta

SEQ ID NO: 2 - DNA, 20 bp, Artificial Sequence
  Synthetic
ggccgcgactgcgagtctcg

SEQ ID NO: 3 - DNA, 20 bp, Artificial Sequence
  Synthetic
gcgccggcagcagccatgag

SEQ ID NO: 4 - DNA, 20 bp, Artificial Sequence
  Synthetic
gcgctgcagccacgactgcc

SEQ ID NO: 5 - DNA, 20 bp, Artificial Sequence
  Synthetic
gtctccggccataatgaccc

SEQ ID NO: 6 - DNA, 20 bp, Artificial Sequence
  Synthetic
gcggcccatcgtgcccgcgc

SEQ ID NO: 7 - DNA, 20 bp, Artificial Sequence
  Synthetic
ggctctgtaggctcgggacc

SEQ ID NO: 8 - DNA, 20 bp, Artificial Sequence
  Synthetic
ggagaagacgaagacagggc

SEQ ID NO: 9 - DNA, 20 bp, Artificial Sequence
  Synthetic
gcccccctcattcccaggca

SEQ ID NO: 10 - DNA, 20 bp, Artificial Sequence
  Synthetic
gcatcctcttcctcctcgtc

SEQ ID NO: 11 - DNA, 20 bp, Artificial Sequence
  Synthetic
ggggagcagccccgtctcca

SEQ ID NO: 12 - DNA, 20 bp, Artificial Sequence
  Synthetic
gaggcggctctcaaggaggg

SEQ ID NO: 13 - DNA, 20 bp, Artificial Sequence
  Synthetic
ggaactgccgcagctcgtcc

SEQ ID NO: 14 - DNA, 20 bp, Artificial Sequence
  Synthetic
gaaccgggggggcagcgccg

SEQ ID NO: 15 - DNA, 20 bp, Artificial Sequence
  Synthetic
ggggtcccggctgacaagtg

SEQ ID NO: 16 - DNA, 20 bp, Artificial Sequence
  Synthetic
ggagcggtcgcaaatgcaac

SEQ ID NO: 17 - DNA, 20 bp, Artificial Sequence
  Synthetic
gcagccgctcctcctggaga

SEQ ID NO: 18 - DNA, 20 bp, Artificial Sequence
  Synthetic
gtggccgtgatggcggcggc

SEQ ID NO: 19 - DNA, 20 bp, Artificial Sequence
  Synthetic
gtcggacaaacacctctacg

SEQ ID NO: 20 - DNA, 20 bp, Artificial Sequence
  Synthetic
gggcttccgctctttcccag

SEQ ID NO: 21 - DNA, 20 bp, Artificial Sequence
  Synthetic
gcaggcccaggccggcgaag

SEQ ID NO: 22 - DNA, 20 bp, Artificial Sequence
  Synthetic
gctggcacccggtcggacct

SEQ ID NO: 23 - DNA, 20 bp, Artificial Sequence
  Synthetic
gagtggcgctcgtcctacga

SEQ ID NO: 24 - DNA, 20 bp, Artificial Sequence
  Synthetic
gcgagcgcgggcggccagcc

SEQ ID NO: 25 - DNA, 20 bp, Artificial Sequence
  Synthetic
gtactccagcttgccctgcg

SEQ ID NO: 26 - DNA, 20 bp, Artificial Sequence
  Synthetic
gctgagcagcgtgggcgagc

SEQ ID NO: 27 - DNA, 20 bp, Artificial Sequence
  Synthetic
gtgggtgccgctgagcaaga

SEQ ID NO: 28 - DNA, 20 bp, Artificial Sequence
  Synthetic
gctgtctgcagtgggcgagc

SEQ ID NO: 29 - DNA, 20 bp, Artificial Sequence
  Synthetic
gcatcgagtacctggtgaaa

SEQ ID NO: 30 - DNA, 20 bp, Artificial Sequence
  Synthetic
gctgtcagccatcggcgagc

SEQ ID NO: 31 - DNA, 20 bp, Artificial Sequence
  Synthetic
gtgcggaaggtgaggctgcc

SEQ ID NO: 32 - DNA, 20 bp, Artificial Sequence
  Synthetic
gcaccgctccctccacgctg

SEQ ID NO: 33 - DNA, 20 bp, Artificial Sequence
  Synthetic
gctcctggaagcggccaagg

SEQ ID NO: 34 - DNA, 20 bp, Artificial Sequence
  Synthetic
ggtgggggagcgggtgttcg

SEQ ID NO: 35 - DNA, 20 bp, Artificial Sequence
  Synthetic
gcacggaggccctaggcccg

SEQ ID NO: 36 - DNA, 20 bp, Artificial Sequence
  Synthetic
gctcccactcgggcttgggg

SEQ ID NO: 37 - DNA, 20 bp, Artificial Sequence
  Synthetic
gtctgccgccttcatcacac

SEQ ID NO: 38 - DNA, 20 bp, Artificial Sequence
  Synthetic
gaggaaaagaaatcctcagc

SEQ ID NO: 39 - DNA, 20 bp, Artificial Sequence
  Synthetic
gttttaggctacttgggagg

SEQ ID NO: 40 - DNA, 20 bp, Artificial Sequence
  Synthetic
gctccggctcctcctcgccg

SEQ ID NO: 41 - DNA, 20 bp, Artificial Sequence
  Synthetic
gcgcgacctgcggcggctcc

SEQ ID NO: 42 - DNA, 20 bp, Artificial Sequence
  Synthetic
ggccgtgaggggcgtctctt

SEQ ID NO: 43 - DNA, 20 bp, Artificial Sequence
  Synthetic
gtcgaggagagccggagtcg

SEQ ID NO: 44 - DNA, 20 bp, Artificial Sequence
  Synthetic
ggagccgcctgaggtgaggc

SEQ ID NO: 45 - DNA, 20 bp, Artificial Sequence
  Synthetic
gtttctctacaaaatggcgc

SEQ ID NO: 46 - DNA, 20 bp, Artificial Sequence
  Synthetic
gagcctaggggagtggagtc

SEQ ID NO: 47 - DNA, 20 bp, Artificial Sequence
  Synthetic
gccgccttctcttctccccc

SEQ ID NO: 48 - DNA, 20 bp, Artificial Sequence
  Synthetic
gcagctccagatcctaggcc

SEQ ID NO: 49 - DNA, 20 bp, Artificial Sequence
  Synthetic
gtcagcttccgcggagccat

SEQ ID NO: 50 - DNA, 20 bp, Artificial Sequence
  Synthetic
gttgttctgacgacgggggt

SEQ ID NO: 51 - DNA, 20 bp, Artificial Sequence
  Synthetic
gccgctatcgcgatagcgcc

SEQ ID NO: 52 - DNA, 20 bp, Artificial Sequence
  Synthetic
gtgagtgacggctccggctc

SEQ ID NO: 53 - DNA, 20 bp, Artificial Sequence
  Synthetic
ggagactaccggctgcggag

SEQ ID NO: 54 - DNA, 20 bp, Artificial Sequence
  Synthetic
gatggagccccgcgacatga

SEQ ID NO: 55 - DNA, 20 bp, Artificial Sequence
  Synthetic
gaatgaatacaacttgatcc

SEQ ID NO: 56 - DNA, 20 bp, Artificial Sequence
  Synthetic
gaacctctctgcctgacaaa

SEQ ID NO: 57 - DNA, 20 bp, Artificial Sequence
  Synthetic
ggcaggctgtgtgccttgcg

SEQ ID NO: 58 - DNA, 20 bp, Artificial Sequence
  Synthetic
ggccgttaggaacatccaag

SEQ ID NO: 59 - DNA, 20 bp, Artificial Sequence
  Synthetic
gcgggccaagaggagaaggg

SEQ ID NO: 60 - DNA, 20 bp, Artificial Sequence
  Synthetic
gacccaggtgcggaagtgcg

SEQ ID NO: 61 - DNA, 20 bp, Artificial Sequence
  Synthetic
gagtgggacagtccacgact

SEQ ID NO: 62 - DNA, 20 bp, Artificial Sequence
  Synthetic
gtgctcccgcgcccaggtgg

SEQ ID NO: 63 - DNA, 20 bp, Artificial Sequence
  Synthetic
gatttcaacacgaagactcc

SEQ ID NO: 64 - DNA, 20 bp, Artificial Sequence
  Synthetic
gagaagaggcgaaactcaaa

SEQ ID NO: 65 - DNA, 20 bp, Artificial Sequence
  Synthetic
gctgaaacgtctttggaagg

SEQ ID NO: 66 - DNA, 20 bp, Artificial Sequence
  Synthetic
gtaaggtccgttggattaag

SEQ ID NO: 67 - DNA, 20 bp, Artificial Sequence
  Synthetic
ggactccccgcacccggttt

SEQ ID NO: 68 - DNA, 20 bp, Artificial Sequence
  Synthetic
gtcatagagcaccacggagc

SEQ ID NO: 69 - DNA, 20 bp, Artificial Sequence
  Synthetic
ggtgccaccatgtcgccaac

SEQ ID NO: 70 - DNA, 20 bp, Artificial Sequence
  Synthetic
gaagcggaaaggtgcgaaag

SEQ ID NO: 71 - DNA, 20 bp, Artificial Sequence
  Synthetic
gcctgggcgttcgccccttt

SEQ ID NO: 72 - DNA, 20 bp, Artificial Sequence
  Synthetic
gcagccacaaactcagacca

SEQ ID NO: 73 - DNA, 20 bp, Artificial Sequence
  Synthetic
gccagcgtgaccaacgacag

SEQ ID NO: 74 - DNA, 20 bp, Artificial Sequence
  Synthetic
ggtagtgttgccgcgagtac

SEQ ID NO: 75 - DNA, 20 bp, Artificial Sequence
  Synthetic
gcaacgtcaccagtttccag

SEQ ID NO: 76 - DNA, 20 bp, Artificial Sequence
  Synthetic
gcgtcaggagggcgggagga

SEQ ID NO: 77 - DNA, 20 bp, Artificial Sequence
  Synthetic
ggtaagtgagggcggaggcg

SEQ ID NO: 78 - DNA, 20 bp, Artificial Sequence
  Synthetic
ggctacgcgaccccggaccc

SEQ ID NO: 79 - DNA, 20 bp, Artificial Sequence
  Synthetic
ggcactaacaccagccggga

SEQ ID NO: 80 - DNA, 20 bp, Artificial Sequence
  Synthetic
gctgccggggacttgagggg

SEQ ID NO: 81 - DNA, 20 bp, Artificial Sequence
  Synthetic
gttggctgaagagcgcacag

SEQ ID NO: 82 - DNA, 20 bp, Artificial Sequence
  Synthetic
gtgagtaaacaagcctgggc

SEQ ID NO: 83 - DNA, 20 bp, Artificial Sequence
  Synthetic
ggaaattggaaggaatccga

SEQ ID NO: 84 - DNA, 20 bp, Artificial Sequence
  Synthetic
ggcgcccctcctcattccga

SEQ ID NO: 85 - DNA, 20 bp, Artificial Sequence
  Synthetic
ggatttcggggtgcgtcgtg

SEQ ID NO: 86 - DNA, 20 bp, Artificial Sequence
  Synthetic
gctgccctcgccgcctggtc

SEQ ID NO: 87 - DNA, 20 bp, Artificial Sequence
  Synthetic
ggggatgtacacaatgaagt

SEQ ID NO: 88 - DNA, 20 bp, Artificial Sequence
  Synthetic
gaaaggagccacaagcgccg

SEQ ID NO: 89 - DNA, 20 bp, Artificial Sequence
  Synthetic
gggctacgactgaggaaggg

SEQ ID NO: 90 - DNA, 20 bp, Artificial Sequence
  Synthetic
gggacgggaggcgagcaaga

SEQ ID NO: 91 - DNA, 20 bp, Artificial Sequence
  Synthetic
ggctgaggctggagcgccga

SEQ ID NO: 92 - DNA, 20 bp, Artificial Sequence
  Synthetic
gctcggagaggaggctgcga

SEQ ID NO: 93 - DNA, 20 bp, Artificial Sequence
  Synthetic
ggctcggtaccacccggcag

SEQ ID NO: 94 - DNA, 20 bp, Artificial Sequence
  Synthetic
ggcgatagtcccgcggggaa

SEQ ID NO: 95 - DNA, 20 bp, Artificial Sequence
  Synthetic
ggcaccaactcgcgaggagg

SEQ ID NO: 96 - DNA, 20 bp, Artificial Sequence
  Synthetic
gtttgggcagatgggcaaga

SEQ ID NO: 97 - DNA, 20 bp, Artificial Sequence
  Synthetic
gcctggcaccgtagaggtag

SEQ ID NO: 98 - DNA, 20 bp, Artificial Sequence
  Synthetic
ggcgaggccgggcccgcttc

SEQ ID NO: 99 - DNA, 20 bp, Artificial Sequence
  Synthetic
gagggaacaagggggtccag

SEQ ID NO: 100 - DNA, 20 bp, Artificial Sequence
  Synthetic
ggaaagtgagtgcgcggcgc

SEQ ID NO: 101 - DNA, 20 bp, Artificial Sequence
  Synthetic
gagttttgtcccctccaata

SEQ ID NO: 102 - DNA, 20 bp, Artificial Sequence
  Synthetic
ggggtcccaggagccgcgga

SEQ ID NO: 103 - DNA, 20 bp, Artificial Sequence
  Synthetic
ggttcgctctctgaggccgt

SEQ ID NO: 104 - DNA, 20 bp, Artificial Sequence
  Synthetic
gaaaggggactagaaatggt

SEQ ID NO: 105 - DNA, 20 bp, Artificial Sequence
  Synthetic
gcggcgtgggagcacctctg

SEQ ID NO: 106 - DNA, 20 bp, Artificial Sequence
  Synthetic
gcgaatagatcaagcaattt

SEQ ID NO: 107 - DNA, 20 bp, Artificial Sequence
  Synthetic
gaagactcggagtgcgatgg

SEQ ID NO: 108 - DNA, 20 bp, Artificial Sequence
  Synthetic
gttccggactattccgggag

SEQ ID NO: 109 - DNA, 20 bp, Artificial Sequence
  Synthetic
ggaagttccaaggcccgcgc

SEQ ID NO: 110 - DNA, 20 bp, Artificial Sequence
  Synthetic
ggctgacagatcagagtgag

SEQ ID NO: 111 - DNA, 20 bp, Artificial Sequence
  Synthetic
ggagcccggggatgtgggcc

SEQ ID NO: 112 - DNA, 20 bp, Artificial Sequence
  Synthetic
ggtagcgggagggcagactc

SEQ ID NO: 113 - DNA, 20 bp, Artificial Sequence
  Synthetic
gtcatgaacgggccggcgga

SEQ ID NO: 114 - DNA, 20 bp, Artificial Sequence
  Synthetic
gtgctgccgcgggaaggctg

SEQ ID NO: 115 - DNA, 20 bp, Artificial Sequence
  Synthetic
gactcggcgagccctcgctg

SEQ ID NO: 116 - DNA, 20 bp, Artificial Sequence
  Synthetic
gttacatcttggaaaagaaa

SEQ ID NO: 117 - DNA, 20 bp, Artificial Sequence
  Synthetic
ggggggggagtgaagggcgt

SEQ ID NO: 118 - DNA, 20 bp, Artificial Sequence
  Synthetic
gcaagactgcccctgtgact

SEQ ID NO: 119 - DNA, 20 bp, Artificial Sequence
  Synthetic
gcctcacgaagcccctgtag

SEQ ID NO: 120 - DNA, 20 bp, Artificial Sequence
  Synthetic
gccactggctgtgcacgtta

SEQ ID NO: 121 - DNA, 20 bp, Artificial Sequence
  Synthetic
gacagagcgagcggccccta

SEQ ID NO: 122 - DNA, 20 bp, Artificial Sequence
  Synthetic
ggcggcccgagatgttatct

SEQ ID NO: 123 - DNA, 20 bp, Artificial Sequence
  Synthetic
gcgtgaagcgaggcgaggca

SEQ ID NO: 124 - DNA, 20 bp, Artificial Sequence
  Synthetic
gctcggcttccatacctata

SEQ ID NO: 125 - DNA, 20 bp, Artificial Sequence
  Synthetic
gcggacccgccatgtggagg

SEQ ID NO: 126 - DNA, 20 bp, Artificial Sequence
  Synthetic
gtcggccacacaggtaatgt

SEQ ID NO: 127 - DNA, 20 bp, Artificial Sequence
  Synthetic
gcagccacaggcggggacgg

SEQ ID NO: 128 - DNA, 20 bp, Artificial Sequence
  Synthetic
gaaagccgccgctgccgacc

SEQ ID NO: 129 - DNA, 20 bp, Artificial Sequence
  Synthetic
ggagcactgaggggattcgt

SEQ ID NO: 130 - DNA, 20 bp, Artificial Sequence
  Synthetic
gaggcggcggccgctccccc

SEQ ID NO: 131 - DNA, 20 bp, Artificial Sequence
  Synthetic
ggccggccctgaagaggctg

SEQ ID NO: 132 - DNA, 20 bp, Artificial Sequence
  Synthetic
ggcgcttccccgcccgaccc

SEQ ID NO: 133 - DNA, 20 bp, Artificial Sequence
  Synthetic
gataaagattcagaaccggc

SEQ ID NO: 134 - DNA, 20 bp, Artificial Sequence
  Synthetic
gtgccaggaccagaaatgta

SEQ ID NO: 135 - DNA, 20 bp, Artificial Sequence
  Synthetic
gagattatccaaaacctgag

SEQ ID NO: 136 - DNA, 20 bp, Artificial Sequence
  Synthetic
gtgagcgataatggcggata

SEQ ID NO: 137 - DNA, 20 bp, Artificial Sequence
  Synthetic
gcgaagctgagcgtaaaggt

SEQ ID NO: 138 - DNA, 20 bp, Artificial Sequence
  Synthetic
gcgtggcaggccttccgctg

SEQ ID NO: 139 - DNA, 20 bp, Artificial Sequence
  Synthetic
ggattccaagggctcggtta

SEQ ID NO: 140 - DNA, 20 bp, Artificial Sequence
  Synthetic
gggctggatgcgcgcgcacc

SEQ ID NO: 141 - DNA, 20 bp, Artificial Sequence
  Synthetic
ggacctaagaggcggtggcc

SEQ ID NO: 142 - DNA, 20 bp, Artificial Sequence
  Synthetic
ggaagaagtgcccagaaggt

SEQ ID NO: 143 - DNA, 20 bp, Artificial Sequence
  Synthetic
gagcccgttgaggccctgcg

SEQ ID NO: 144 - DNA, 20 bp, Artificial Sequence
  Synthetic
gcgcaatggagcggaagagg

SEQ ID NO: 145 - DNA, 20 bp, Artificial Sequence
  Synthetic
gatcaatctgaagtccccgg

SEQ ID NO: 146 - DNA, 20 bp, Artificial Sequence
  Synthetic
ggctcgggatcccgggacgc

SEQ ID NO: 147 - DNA, 20 bp, Artificial Sequence
  Synthetic
gaagctagatccgccacaaa

SEQ ID NO: 148 - DNA, 20 bp, Artificial Sequence
  Synthetic
ggagaagtttgaccacctag

SEQ ID NO: 149 - DNA, 20 bp, Artificial Sequence
  Synthetic
gttgagcccggcctggctgc

SEQ ID NO: 150 - DNA, 20 bp, Artificial Sequence
  Synthetic
ggtctccccagggcctggcc

SEQ ID NO: 151 - DNA, 20 bp, Artificial Sequence
  Synthetic
gcggccgagagacaacaagg

SEQ ID NO: 152 - DNA, 20 bp, Artificial Sequence
  Synthetic
gagggagccgaaaagggggg

SEQ ID NO: 153 - DNA, 20 bp, Artificial Sequence
  Synthetic
gtagcgccggaggcaccagc

SEQ ID NO: 154 - DNA, 20 bp, Artificial Sequence
  Synthetic
gccggcggcggctgctgtga

SEQ ID NO: 155 - DNA, 20 bp, Artificial Sequence
  Synthetic
ggttacagtgacaatcttcc

SEQ ID NO: 156 - DNA, 20 bp, Artificial Sequence
  Synthetic
ggtgcgcccttgggccgtgg

SEQ ID NO: 157 - DNA, 20 bp, Artificial Sequence
  Synthetic
gactctgcccgctcccgttt

SEQ ID NO: 158 - DNA, 20 bp, Artificial Sequence
  Synthetic
gtgtgccgttgcgccaagcc

SEQ ID NO: 159 - DNA, 20 bp, Artificial Sequence
  Synthetic
gtggttctccagctgcactg

SEQ ID NO: 160 - DNA, 20 bp, Artificial Sequence
  Synthetic
gatacgggcggcgggagctg

SEQ ID NO: 161 - DNA, 20 bp, Artificial Sequence
  Synthetic
ggtcagtcaaatgtgagtag

SEQ ID NO: 162 - DNA, 20 bp, Artificial Sequence
  Synthetic
gccgcctcagtcacagagcc

SEQ ID NO: 163 - DNA, 20 bp, Artificial Sequence
  Synthetic
gggagcttgcggtgcgttct

SEQ ID NO: 164 - DNA, 20 bp, Artificial Sequence
  Synthetic
gcgttgcgttcggtttcccg

SEQ ID NO: 165 - DNA, 20 bp, Artificial Sequence
  Synthetic
gaggcttccctgcggagagc

SEQ ID NO: 166 - DNA, 20 bp, Artificial Sequence
  Synthetic
ggaatataggggcagagggg

SEQ ID NO: 167 - DNA, 20 bp, Artificial Sequence
  Synthetic
ggcgggggtgatagtacaga

SEQ ID NO: 168 - DNA, 20 bp, Artificial Sequence
  Synthetic
ggcggctcctcctcctcctt

SEQ ID NO: 169 - DNA, 20 bp, Artificial Sequence
  Synthetic
gtcactcactcgccggcctc

SEQ ID NO: 170 - DNA, 20 bp, Artificial Sequence
  Synthetic
ggcgtctccgcagcagatca

SEQ ID NO: 171 - DNA, 20 bp, Artificial Sequence
  Synthetic
gcggctgctgtctgcgcttg

SEQ ID NO: 172 - DNA, 20 bp, Artificial Sequence
  Synthetic
ggcgagcctgagagccgggc

SEQ ID NO: 173 - DNA, 20 bp, Artificial Sequence
  Synthetic
ggagcggctgggaggcggtt

SEQ ID NO: 174 - DNA, 20 bp, Artificial Sequence
  Synthetic
gtttcgctagatcacagcct

SEQ ID NO: 175 - DNA, 20 bp, Artificial Sequence
  Synthetic
gattgtctgtggaccagttt

SEQ ID NO: 176 - DNA, 20 bp, Artificial Sequence
  Synthetic
gcgtttacaggttctctttc

SEQ ID NO: 177 - DNA, 20 bp, Artificial Sequence
  Synthetic
gaaagacgaaagaccgcctt

SEQ ID NO: 178 - DNA, 20 bp, Artificial Sequence
  Synthetic
gtgcggtctctccgagagcg

SEQ ID NO: 179 - DNA, 20 bp, Artificial Sequence
  Synthetic
ggctctaagcgtggcagtct

SEQ ID NO: 180 - DNA, 20 bp, Artificial Sequence
  Synthetic
gaccgagagtgggctggcta

SEQ ID NO: 181 - DNA, 20 bp, Artificial Sequence
  Synthetic
ggcagaacccacggctgata

SEQ ID NO: 182 - DNA, 20 bp, Artificial Sequence
  Synthetic
gcgttgggcgtactagcggc

SEQ ID NO: 183 - DNA, 20 bp, Artificial Sequence
  Synthetic
gtgggatgtaagcgcggagg

SEQ ID NO: 184 - DNA, 20 bp, Artificial Sequence
  Synthetic
gacagactttacagccccgg

SEQ ID NO: 185 - DNA, 20 bp, Artificial Sequence
  Synthetic
ggactctccttggggtttgg

SEQ ID NO: 186 - DNA, 20 bp, Artificial Sequence
  Synthetic
gctcggccgggccgcggcca

SEQ ID NO: 187 - DNA, 20 bp, Artificial Sequence
  Synthetic
gccgcaggcgacaagggccc

SEQ ID NO: 188 - DNA, 20 bp, Artificial Sequence
  Synthetic
gacagtggtgtggagccccg

SEQ ID NO: 189 - DNA, 20 bp, Artificial Sequence
  Synthetic
gccgccaacatgtacagggt

SEQ ID NO: 190 - DNA, 20 bp, Artificial Sequence
  Synthetic
gttgggctctgccggccgca

SEQ ID NO: 191 - DNA, 20 bp, Artificial Sequence
  Synthetic
gaacgagctcggctcctgcc

SEQ ID NO: 192 - DNA, 20 bp, Artificial Sequence
  Synthetic
gcctcagcgtcccgggagtg

SEQ ID NO: 193 - DNA, 20 bp, Artificial Sequence
  Synthetic
gccccagaacgtgggggccg

SEQ ID NO: 194 - DNA, 20 bp, Artificial Sequence
  Synthetic
gtccaggcgcgctacacgtt

SEQ ID NO: 195 - DNA, 20 bp, Artificial Sequence
  Synthetic
ggggaggaacgccttgtcac

SEQ ID NO: 196 - DNA, 20 bp, Artificial Sequence
  Synthetic
gtcgggctggcttcgcgggg

SEQ ID NO: 197 - DNA, 20 bp, Artificial Sequence
  Synthetic
gaccgtgccactcggtcgcc

SEQ ID NO: 198 - DNA, 20 bp, Artificial Sequence
  Synthetic
gacggcggcgcgggcccgta

SEQ ID NO: 199 - DNA, 20 bp, Artificial Sequence
  Synthetic
gctctggagggcttgagcgg

SEQ ID NO: 200 - DNA, 20 bp, Artificial Sequence
  Synthetic
gctccagatggcgtcttccg

SEQ ID NO: 201 - DNA, 20 bp, Artificial Sequence
  Synthetic
gatggtcaattagagttccc

SEQ ID NO: 202 - DNA, 20 bp, Artificial Sequence
  Synthetic
gtgaacgcgcaggcagcacc

SEQ ID NO: 203 - DNA, 20 bp, Artificial Sequence
  Synthetic
gcggaaagtgggttgagatg

SEQ ID NO: 204 - DNA, 20 bp, Artificial Sequence
  Synthetic
gcggcctgaggagacccgtt

SEQ ID NO: 205 - DNA, 20 bp, Artificial Sequence
  Synthetic
gggtaaggccgggcccaggg

SEQ ID NO: 206 - DNA, 20 bp, Artificial Sequence
  Synthetic
ggcccggcagctgaccaagg

SEQ ID NO: 207 - DNA, 20 bp, Artificial Sequence
  Synthetic
gcaggtgcgacaaggctact

SEQ ID NO: 208 - DNA, 20 bp, Artificial Sequence
  Synthetic
gcctcatcgcgatcgcaatc

SEQ ID NO: 209 - DNA, 20 bp, Artificial Sequence
  Synthetic
gatggacccgctacggaacg

SEQ ID NO: 210 - DNA, 20 bp, Artificial Sequence
  Synthetic
gtcggccagcggtgcgaatt

SEQ ID NO: 211 - DNA, 20 bp, Artificial Sequence
  Synthetic
gcttacctgggttcggggtc

SEQ ID NO: 212 - DNA, 20 bp, Artificial Sequence
  Synthetic
gcctgtaaccctctggggat

SEQ ID NO: 213 - DNA, 20 bp, Artificial Sequence
  Synthetic
ggggggtgcgaaggcaggat

SEQ ID NO: 214 - DNA, 20 bp, Artificial Sequence
  Synthetic
gtaggcgctgccaaaaccga

SEQ ID NO: 215 - DNA, 20 bp, Artificial Sequence
  Synthetic
ggcgcctctgtctgagacgg

SEQ ID NO: 216 - DNA, 20 bp, Artificial Sequence
  Synthetic
ggtgtctctcccgaccatgg

SEQ ID NO: 217 - DNA, 20 bp, Artificial Sequence
  Synthetic
gaaggtaaccgggcgaccga

SEQ ID NO: 218 - DNA, 20 bp, Artificial Sequence
  Synthetic
gggcgttacacagatggagg

SEQ ID NO: 219 - DNA, 20 bp, Artificial Sequence
  Synthetic
gctcagcgccggaggtaggc

SEQ ID NO: 220 - DNA, 20 bp, Artificial Sequence
  Synthetic
gactggcagctcattctcca

SEQ ID NO: 221 - DNA, 20 bp, Artificial Sequence
  Synthetic
gtacacagaaatctggggcc

SEQ ID NO: 222 - DNA, 20 bp, Artificial Sequence
  Synthetic
ggtaagagtctaattgatct

SEQ ID NO: 223 - DNA, 20 bp, Artificial Sequence
  Synthetic
gtgactgatgtcgtaactag

SEQ ID NO: 224 - DNA, 20 bp, Artificial Sequence
  Synthetic
gggcccacgccccggcaccc

SEQ ID NO: 225 - DNA, 20 bp, Artificial Sequence
  Synthetic
gtcgctgtcgcacggccgcg

SEQ ID NO: 226 - DNA, 20 bp, Artificial Sequence
  Synthetic
ggcaccctcaccttccttgt

SEQ ID NO: 227 - DNA, 20 bp, Artificial Sequence
  Synthetic
gctgagccgcggcctcgaca

SEQ ID NO: 228 - DNA, 20 bp, Artificial Sequence
  Synthetic
gggggcgcaggaaacaatag

SEQ ID NO: 229 - DNA, 20 bp, Artificial Sequence
  Synthetic
gttgttgccggagctgagac

SEQ ID NO: 230 - DNA, 20 bp, Artificial Sequence
  Synthetic
gctgcgttttagagaagcgt

SEQ ID NO: 231 - DNA, 20 bp, Artificial Sequence
  Synthetic
ggtggacgccgcgaagagac

SEQ ID NO: 232 - DNA, 20 bp, Artificial Sequence
  Synthetic
ggagcgcagccgctggagga

SEQ ID NO: 233 - DNA, 20 bp, Artificial Sequence
  Synthetic
gcgcgcgcgttgaccgcctc

SEQ ID NO: 234 - DNA, 20 bp, Artificial Sequence
  Synthetic
gcccttgtccgggggttgct

SEQ ID NO: 235 - DNA, 20 bp, Artificial Sequence
  Synthetic
ggcgggcaagaggggagtcc

SEQ ID NO: 236 - DNA, 20 bp, Artificial Sequence
  Synthetic
ggaccaccatggtaaagaag

SEQ ID NO: 237 - DNA, 20 bp, Artificial Sequence
  Synthetic
gcgcgggccggcggagccag

SEQ ID NO: 238 - DNA, 20 bp, Artificial Sequence
  Synthetic
gggcgcactgtcctagctgc

SEQ ID NO: 239 - DNA, 20 bp, Artificial Sequence
  Synthetic
gcctcccacagccacgtgaa

SEQ ID NO: 240 - DNA, 20 bp, Artificial Sequence
  Synthetic
gcaggcggcctcagggcttg

SEQ ID NO: 241 - DNA, 20 bp, Artificial Sequence
  Synthetic
ggtcagggcgagcgtctcgc

SEQ ID NO: 242 - DNA, 20 bp, Artificial Sequence
  Synthetic
ggagtcgcgcgttacccagg

SEQ ID NO: 243 - DNA, 20 bp, Artificial Sequence
  Synthetic
gatcgaccgcgagaaggtga

SEQ ID NO: 244 - DNA, 20 bp, Artificial Sequence
  Synthetic
gtgagcggggtccccgctcc

SEQ ID NO: 245 - DNA, 20 bp, Artificial Sequence
  Synthetic
ggcccgggacagttggtgtt

SEQ ID NO: 246 - DNA, 20 bp, Artificial Sequence
  Synthetic
gcagagtgaattgccgctgc

SEQ ID NO: 247 - DNA, 20 bp, Artificial Sequence
  Synthetic
gaatagcccgcttctgtccc

SEQ ID NO: 248 - DNA, 20 bp, Artificial Sequence
  Synthetic
gccagcagggattggctaac

SEQ ID NO: 249 - DNA, 20 bp, Artificial Sequence
  Synthetic
gactccaccaaggcggatga

SEQ ID NO: 250 - DNA, 20 bp, Artificial Sequence
  Synthetic
ggttcctcctctcgcccgaa

SEQ ID NO: 251 - DNA, 20 bp, Artificial Sequence
  Synthetic
gattgacccggctctgaaaa

SEQ ID NO: 252 - DNA, 20 bp, Artificial Sequence
  Synthetic
gcacggctgggggggcgcgc

SEQ ID NO: 253 - DNA, 20 bp, Artificial Sequence
  Synthetic
gggctagtccgccggccgct

SEQ ID NO: 254 - DNA, 20 bp, Artificial Sequence
  Synthetic
gctcggtcccagggcccgca

SEQ ID NO: 255 - DNA, 20 bp, Artificial Sequence
  Synthetic
ggcctgtccctcgcctacct

SEQ ID NO: 256 - DNA, 20 bp, Artificial Sequence
  Synthetic
gcggccgcttctctgttacc

SEQ ID NO: 257 - DNA, 20 bp, Artificial Sequence
  Synthetic
gcctgtgaccgcttcgttag

SEQ ID NO: 258 - DNA, 20 bp, Artificial Sequence
  Synthetic
gggacgccactcacgtgcac

SEQ ID NO: 259 - DNA, 20 bp, Artificial Sequence
  Synthetic
gagggccgaggtgagaggtg

SEQ ID NO: 260 - DNA, 20 bp, Artificial Sequence
  Synthetic
gggcggtttgaatggagccg

SEQ ID NO: 261 - DNA, 20 bp, Artificial Sequence
  Synthetic
ggcgcgccctgtgcggggcc

SEQ ID NO: 262 - DNA, 20 bp, Artificial Sequence
  Synthetic
gggaaggccacagtgtcgcg

SEQ ID NO: 263 - DNA, 20 bp, Artificial Sequence
  Synthetic
ggcctggtcgtcgtctgcgg

SEQ ID NO: 264 - DNA, 20 bp, Artificial Sequence
  Synthetic
gggccgagggaaaccgaagc

SEQ ID NO: 265 - DNA, 20 bp, Artificial Sequence
  Synthetic
gcgagggatcaggagggctg

SEQ ID NO: 266 - DNA, 20 bp, Artificial Sequence
  Synthetic
gctgtttatcgacggaagga

SEQ ID NO: 267 - DNA, 20 bp, Artificial Sequence
  Synthetic
gacggtgtcccagctggatt

SEQ ID NO: 268 - DNA, 20 bp, Artificial Sequence
  Synthetic
ggtgggttcgcgcgcccgtg

SEQ ID NO: 269 - DNA, 20 bp, Artificial Sequence
  Synthetic
gacaacgtgcggctgtggct

SEQ ID NO: 270 - DNA, 20 bp, Artificial Sequence
  Synthetic
gaccgcggccctgcagcccc

SEQ ID NO: 271 - DNA, 20 bp, Artificial Sequence
  Synthetic
gcctcgtagtacttcacgtt

SEQ ID NO: 272 - DNA, 20 bp, Artificial Sequence
  Synthetic
gtggctccaagcggcggcgc

SEQ ID NO: 273 - DNA, 20 bp, Artificial Sequence
  Synthetic
gccgcacaaagaaccggaac

SEQ ID NO: 274 - DNA, 20 bp, Artificial Sequence
  Synthetic
gactcgggcggccaaacctc

SEQ ID NO: 275 - DNA, 20 bp, Artificial Sequence
  Synthetic
gcccgggagattccggatcc

SEQ ID NO: 276 - DNA, 20 bp, Artificial Sequence
  Synthetic
ggaactcgcgaacttggatt

SEQ ID NO: 277 - DNA, 20 bp, Artificial Sequence
  Synthetic
gaatgggagtctgccagtca

SEQ ID NO: 278 - DNA, 20 bp, Artificial Sequence
  Synthetic
gccaggcagcgatggggagg

SEQ ID NO: 279 - DNA, 20 bp, Artificial Sequence
  Synthetic
gaaagtgctcggcagggggg

SEQ ID NO: 280 - DNA, 20 bp, Artificial Sequence
  Synthetic
gcgggtgagtgtttccaagt

SEQ ID NO: 281 - DNA, 20 bp, Artificial Sequence
  Synthetic
gaactcggggtctagccaag

SEQ ID NO: 282 - DNA, 20 bp, Artificial Sequence
  Synthetic
ggcctcaaggaggcctcaac

SEQ ID NO: 283 - DNA, 20 bp, Artificial Sequence
  Synthetic
gtcagtccgtcgggagggct

SEQ ID NO: 284 - DNA, 20 bp, Artificial Sequence
  Synthetic
gctcgggtcttgggaacgtg

SEQ ID NO: 285 - DNA, 20 bp, Artificial Sequence
  Synthetic
gtgtgaacccgcaggaggcc

SEQ ID NO: 286 - DNA, 20 bp, Artificial Sequence
  Synthetic
gggcgagcggttggtattgc

SEQ ID NO: 287 - DNA, 20 bp, Artificial Sequence
  Synthetic
ggcgggtagctggcgggggg

SEQ ID NO: 288 - DNA, 20 bp, Artificial Sequence
  Synthetic
gcctcagaagcacggcggtg

SEQ ID NO: 289 - DNA, 20 bp, Artificial Sequence
  Synthetic
gtgatggtggcctccctcgg

SEQ ID NO: 290 - DNA, 20 bp, Artificial Sequence
  Synthetic
gttctcagtgtcgctgcgct

SEQ ID NO: 291 - DNA, 20 bp, Artificial Sequence
  Synthetic
gctaatgcaaacaacaaaac

SEQ ID NO: 292 - DNA, 20 bp, Artificial Sequence
  Synthetic
gctgcccccaacaaagatgg

SEQ ID NO: 293 - DNA, 20 bp, Artificial Sequence
  Synthetic
gggtccccgcctcttaccgg

SEQ ID NO: 294 - DNA, 20 bp, Artificial Sequence
  Synthetic
gggcccgcggaccgactccg

SEQ ID NO: 295 - DNA, 20 bp, Artificial Sequence
  Synthetic
gcttcgggcaaactgaagag

SEQ ID NO: 296 - DNA, 20 bp, Artificial Sequence
  Synthetic
ggcaaaattcgagtaatttc

SEQ ID NO: 297 - DNA, 20 bp, Artificial Sequence
  Synthetic
gtccgcctcagcgtccgctc

SEQ ID NO: 298 - DNA, 20 bp, Artificial Sequence
  Synthetic
gaggcgaattgtgagtgttc

SEQ ID NO: 299 - DNA, 20 bp, Artificial Sequence
  Synthetic
gctgcactctcacctgtagt

SEQ ID NO: 300 - DNA, 20 bp, Artificial Sequence
  Synthetic
gaccatccacgcccgccgcc

SEQ ID NO: 301 - DNA, 20 bp, Artificial Sequence
  Synthetic
gctgctgcagtgttgtgagt

SEQ ID NO: 302 - DNA, 20 bp, Artificial Sequence
  Synthetic
ggcggtccccgctgcagcca

SEQ ID NO: 303 - DNA, 20 bp, Artificial Sequence
  Synthetic
gccccggctcgatggccccg

SEQ ID NO: 304 - DNA, 20 bp, Artificial Sequence
  Synthetic
gggtcgcgggccgggcctgc

SEQ ID NO: 305 - DNA, 20 bp, Artificial Sequence
  Synthetic
ggcgggcgtccgaacggccc

SEQ ID NO: 306 - DNA, 20 bp, Artificial Sequence
  Synthetic
gcggccgagcggttgcgacg

SEQ ID NO: 307 - DNA, 20 bp, Artificial Sequence
  Synthetic
ggccgcacaggagacaaggg

SEQ ID NO: 308 - DNA, 20 bp, Artificial Sequence
  Synthetic
gctctggcggcctcggtctc

SEQ ID NO: 309 - DNA, 20 bp, Artificial Sequence
  Synthetic
ggcacgcaccttgctctgag

SEQ ID NO: 310 - DNA, 20 bp, Artificial Sequence
  Synthetic
gaggtggctgtgaggacgaa

SEQ ID NO: 311 - DNA, 20 bp, Artificial Sequence
  Synthetic
ggaggaggcggcccaactgt

SEQ ID NO: 312 - DNA, 20 bp, Artificial Sequence
  Synthetic
gcggagcttccgcgtcgcta

SEQ ID NO: 313 - DNA, 20 bp, Artificial Sequence
  Synthetic
gggctgaacgcgtattcgcg

SEQ ID NO: 314 - DNA, 20 bp, Artificial Sequence
  Synthetic
ggcgattcggcgaccttagt

SEQ ID NO: 315 - DNA, 20 bp, Artificial Sequence
  Synthetic
ggcgcgagtacgaaattaat

SEQ ID NO: 316 - DNA, 20 bp, Artificial Sequence
  Synthetic
gattatcagacgcgctgcgt

SEQ ID NO: 317 - DNA, 20 bp, Artificial Sequence
  Synthetic
gcgcggctagaatagacttg

SEQ ID NO: 318 - DNA, 20 bp, Artificial Sequence
  Synthetic
ggttcgtgcggtagtgtgcg

SEQ ID NO: 319 - DNA, 20 bp, Artificial Sequence
  Synthetic
gtatcgtcttccgtcctcgt

SEQ ID NO: 320 - DNA, 20 bp, Artificial Sequence
  Synthetic
ggctactctatgcgtcgatt

SEQ ID NO: 321 - DNA, 20 bp, Artificial Sequence
  Synthetic
gcttaacaaagcgagcgacc

SEQ ID NO: 322 - DNA, 20 bp, Artificial Sequence
  Synthetic
ggcactggacgatatccgac

SEQ ID NO: 323 - DNA, 20 bp, Artificial Sequence
  Synthetic
gttcatctcaacggtaatcg

SEQ ID NO: 324 - DNA, 20 bp, Artificial Sequence
  Synthetic
ggttatattgacgtcctgcc

SEQ ID NO: 325 - DNA, 21 bp, Artificial Sequence
  Synthetic
gctagtctgcgtgacgcgtct

SEQ ID NO: 326 - DNA, 22 bp, Artificial Sequence
  Synthetic
gaagtaactgaaggatcaatat

SEQ ID NO: 327 - DNA, 21 bp, Artificial Sequence
  Synthetic
gcgggaaaaccgcgccccgga

SEQ ID NO: 328 - DNA, 21 bp, Artificial Sequence
  Synthetic
gctcagggccgtgagcgtggg

SEQ ID NO: 329 - DNA, 21 bp, Artificial Sequence
  Synthetic
gtaggagcgcgtgctgattgt

SEQ ID NO: 330 - DNA, 22 bp, Artificial Sequence
  Synthetic
ggacgaactaatgtattgtggc

SEQ ID NO: 331 - DNA, 21 bp, Artificial Sequence
  Synthetic
ggtttatggaccttcagggag

SEQ ID NO: 332 - DNA, 22 bp, Artificial Sequence
  Synthetic
ggcgtacccgtggtttcaccgt

SEQ ID NO: 333 - DNA, 22 bp, Artificial Sequence
  Synthetic
gcttgggagcaagccggcggta

SEQ ID NO: 334 - DNA, 21 bp, Artificial Sequence
  Synthetic
gtgtggcgaccctggtctcat

SEQ ID NO: 335 - DNA, 21 bp, Artificial Sequence
  Synthetic
gggcctctgtgaggtcgtggt

SEQ ID NO: 336 - DNA, 20 bp, Artificial Sequence
  Synthetic
gtatgatactcgtgcttagt

SEQ ID NO: 337 - DNA, 20 bp, Artificial Sequence
  Synthetic
gcgaagtcgaatgttggtcg

SEQ ID NO: 338 - DNA, 21 bp, Artificial Sequence
  Synthetic
ggcccaacatcctcgtgtcca

SEQ ID NO: 339 - DNA, 22 bp, Artificial Sequence
  Synthetic
gtggcggagcctagccgagagt

SEQ ID NO: 340 - DNA, 21 bp, Artificial Sequence
  Synthetic
ggcgcgaactttaaggtggac

SEQ ID NO: 341 - DNA, 22 bp, Artificial Sequence
  Synthetic
gattagttcgcgtatggcagca

SEQ ID NO: 342 - DNA, 21 bp, Artificial Sequence
  Synthetic
gccgtaaggacgggtagaggt

SEQ ID NO: 343 - DNA, 20 bp, Artificial Sequence
  Synthetic
gggggcggaaatcgagccct

SEQ ID NO: 344 - DNA, 22 bp, Artificial Sequence
  Synthetic
gaagtgagaggagggagcagcc

SEQ ID NO: 345 - DNA, 19 bp, Artificial Sequence
  Synthetic
gtaaatcccgggagtcaga

SEQ ID NO: 346 - DNA, 20 bp, Artificial Sequence
  Synthetic
gtgagcggcgaccccccctg

SEQ ID NO: 347 - DNA, 21 bp, Artificial Sequence
  Synthetic
ggtgcggacccccgccggggg

SEQ ID NO: 348 - DNA, 21 bp, Artificial Sequence
  Synthetic
ggtgagccggtttgtgagaag

SEQ ID NO: 349 - DNA, 22 bp, Artificial Sequence
  Synthetic
gagagtgcgctgcaatggatat

SEQ ID NO: 350 - DNA, 22 bp, Artificial Sequence
  Synthetic
ggatgtgccatggtgagggctg

SEQ ID NO: 351 - DNA, 22 bp, Artificial Sequence
  Synthetic
ggatgcgcctaggcgaaagaaa

SEQ ID NO: 352 - DNA, 21 bp, Artificial Sequence
  Synthetic
gagccgatgcagggcgtaggg

SEQ ID NO: 353 - DNA, 22 bp, Artificial Sequence
  Synthetic
gccattctctatgttcgataag

SEQ ID NO: 354 - DNA, 20 bp, Artificial Sequence
  Synthetic
ggatcgtggtactgctatgg

SEQ ID NO: 355 - DNA, 21 bp, Artificial Sequence
  Synthetic
ggcaggtggcggagattgcac

SEQ ID NO: 356 - DNA, 20 bp, Artificial Sequence
  Synthetic
ggcgtgaggctacgagcggt

SEQ ID NO: 357 - DNA, 20 bp, Artificial Sequence
  Synthetic
gccaagcaccggctcatgtg

SEQ ID NO: 358 - DNA, 19 bp, Artificial Sequence
  Synthetic
ggaagcaaggaccgaccga

SEQ ID NO: 359 - DNA, 45 bp, Artificial Sequence
  Synthetic
  misc_feature (19)..(19): n is a, c, g, or t
ggagaaccaccttgttggngtttaagagctatgctggaaacagca

SEQ ID NO: 360 - DNA, 73 bp, Artificial Sequence
  Synthetic
  misc_feature (13)..(22): n is a, c, g, or t
ctagtactcgagnnnnnnnnnngcgtcgaccctagggctagcactagtaaaaaaagcaccgactcggtgccac

SEQ ID NO: 361 - DNA, 51 bp, Artificial Sequence
  Synthetic
aatgatacggcgaccaccgagatctacacggtaatacggttatccacgcgg

SEQ ID NO: 362 - DNA, 53 bp, Artificial Sequence
  Synthetic
  misc_feature (25)..(32): n is a, c, g, or t
caagcagaagacggcatacgagatnnnnnnnngcacaaaaggaaactcaccct

SEQ ID NO: 363 - DNA, 46 bp, Artificial Sequence
  Synthetic
gtgtgttttgagactataagtatcccttggagaaccaccttgttgg

SEQ ID NO: 364 - DNA, 50 bp, Artificial Sequence
  Synthetic
gtctcaaaacacacaattactttacagttagggtgagtttccttttgtgc

SEQ ID NO: 365 - DNA, 54 bp, Artificial Sequence
  Synthetic
aatgatacggcgaccaccgagatctacactgagactataagtatcccttggaga

SEQ ID NO: 366 - DNA, 88 bp, Artificial Sequence
  Synthetic
  misc_feature (25)..(30): n is a, c, g, or t
caagcagaagacggcatacgagatnnnnnnctggcgaactacttactctagcttcccggcaacgccttatttaaacttgctatgctgt

SEQ ID NO: 367 - DNA, 55 bp, Artificial Sequence
  Synthetic
cgaagttataaacagcacaaaaggaaactcaccctaactgtaaagtaattgtgtg

SEQ ID NO: 368 - DNA, 46 bp, Artificial Sequence
  Synthetic
gtttaaataaggcgttgccgggaagctagagtaagtagttcgccag

SEQ ID NO: 369 - DNA, 39 bp, Artificial Sequence
  Synthetic
gcaccgactcggtgccactttttcaagttgataacggac

SEQ ID NO: 370 - DNA, 23 bp, Artificial Sequence
  Synthetic
ttactgcatgtccaagttcaaga

SEQ ID NO: 371 - DNA, 20 bp, Artificial Sequence
  Synthetic
ccaggtgtcgttcagtaccc

SEQ ID NO: 372 - DNA, 20 bp, Artificial Sequence
  Synthetic
ggtggtaacagcacacgaga

SEQ ID NO: 373 - DNA, 23 bp, Artificial Sequence
  Synthetic
ttgccagcatttctataagttcc

SEQ ID NO: 374 - DNA, 23 bp, Artificial Sequence
  Synthetic
tgcagaggctaacattagaacac

SEQ ID NO: 375 - DNA, 21 bp, Artificial Sequence
  Synthetic
gctgttgcttccgaatgatga

SEQ ID NO: 376 - DNA, 21 bp, Artificial Sequence
  Synthetic
tgaaccgacacttccacatga

SEQ ID NO: 377 - DNA, 21 bp, Artificial Sequence
  Synthetic
tggtcccagatgaccttggat

SEQ ID NO: 378 - DNA, 27 bp, Artificial Sequence
  Synthetic
caccgcccaagtgaagttgctcgcagc

SEQ ID NO: 379 - DNA, 27 bp, Artificial Sequence
  Synthetic
aaacgctgcgagcaacttcacttgggc

SEQ ID NO: 380 - DNA, 38 bp, Artificial Sequence
  Synthetic
aaagtgccacctgacactcagtcctagatgtcgtgcgg

SEQ ID NO: 381 - DNA, 19 bp, Artificial Sequence
  Synthetic
tcacttgggcccctgggct

SEQ ID NO: 382 - DNA, 41 bp, Artificial Sequence
  Synthetic
caggggcccaagtgaactagtaaaattcgcccctctccctc

SEQ ID NO: 383 - DNA, 43 bp, Artificial Sequence
  Synthetic
cagctgcgagcaactttaacctgcaaaaagggagcagtaaagg

SEQ ID NO: 384 - DNA, 19 bp, Artificial Sequence
  Synthetic
agttgctcgcagctggggt

SEQ ID NO: 385 - DNA, 41 bp, Artificial Sequence
  Synthetic
agctggagaccgttttttctgactgactggatacagggcat

SEQ ID NO: 386 - DNA, 72 bp, Artificial Sequence
  Synthetic
  misc_feature (27)..(46): N is any amino acid
  misc_feature (27)..(46): n is a, c, g, or t
gtatcccttggagaaccaccttgttgnnnnnnnnnnnnnnnnnnnngtttaagagctaagctggaaacagca

SEQ ID NO: 387 - DNA, 41 bp, Artificial Sequence
  Synthetic
gatcctagtactcgagaaaaaaagcaccgactcggtgccac

SEQ ID NO: 388 - DNA, 20 bp, Artificial Sequence
  Synthetic
gggagagagcttgagagcgc

SEQ ID NO: 389 - DNA, 23 bp, Artificial Sequence
  Synthetic
gcccaggcgcgtgccgctgcgag

SEQ ID NO: 390 - DNA, 21 bp, Artificial Sequence
  Synthetic
gcggtatccacgtaaatcaaa

SEQ ID NO: 391 - DNA, 23 bp, Artificial Sequence
  Synthetic
gctccggtctgggaggttgctag

SEQ ID NO: 392 - DNA, 22 bp, Artificial Sequence
  Synthetic
gcaccaatcactggctccggtc

SEQ ID NO: 393 - DNA, 22 bp, Artificial Sequence
  Synthetic
gactgagaagactgggcgcccg

SEQ ID NO: 394 - DNA, 20 bp, Artificial Sequence
  Synthetic
gaatctgaatcgctgagcta

SEQ ID NO: 395 - DNA, 20 bp, Artificial Sequence
  Synthetic
gaggccggggacagaagaga

SEQ ID NO: 396 - DNA, 20 bp, Artificial Sequence
  Synthetic
gagcgcctggaccgaccgcc

SEQ ID NO: 397 - DNA, 25 bp, Artificial Sequence
  Synthetic
gaaatcgtagtcctgctggctgact

SEQ ID NO: 398 - DNA, 21 bp, Artificial Sequence
  Synthetic
gtgtgtgtgttcctaggagaa

SEQ ID NO: 399 - DNA, 22 bp, Artificial Sequence
  Synthetic
gtctagctttggctctcgttct

SEQ ID NO: 400 - DNA, 20 bp, Artificial Sequence
  Synthetic
ggctgggtgtcccattgaaa

SEQ ID NO: 401 - DNA, 21 bp, Artificial Sequence
  Synthetic
gaatggagagtttgcaaggag

SEQ ID NO: 402 - DNA, 21 bp, Artificial Sequence
  Synthetic
gtctggagggaaaagtgtctt

SEQ ID NO: 403 - DNA, 22 bp, Artificial Sequence
  Synthetic
gagttactgcggagagaagaaa

SEQ ID NO: 404 - DNA, 21 bp, Artificial Sequence
  Synthetic
gagggaaaggctgctcagaca

SEQ ID NO: 405 - DNA, 20 bp, Artificial Sequence
  Synthetic
ggctgctgggagttgtgcaa

SEQ ID NO: 406 - DNA, 20 bp, Artificial Sequence
  Synthetic
ggtctccagagtggagtccg

SEQ ID NO: 407 - DNA, 20 bp, Artificial Sequence
  Synthetic
ggaagtttcaggtcaagtgg

SEQ ID NO: 408 - DNA, 20 bp, Artificial Sequence
  Synthetic
ggcactccacgtggtgggta

SEQ ID NO: 409 - DNA, 20 bp, Artificial Sequence
  Synthetic
gcctttgcaccctttggatg

SEQ ID NO: 410 - DNA, 20 bp, Artificial Sequence
  Synthetic
gagggtaatagagagaggga

SEQ ID NO: 411 - DNA, 20 bp, Artificial Sequence
  Synthetic
gttcgtggctcacctctggc

SEQ ID NO: 412 - DNA, 20 bp, Artificial Sequence
  Synthetic
gtgcgtatgcgagagagggc

SEQ ID NO: 413 - DNA, 20 bp, Artificial Sequence
  Synthetic
gcattatcccttagatgcca

SEQ ID NO: 414 - DNA, 20 bp, Artificial Sequence
  Synthetic
ggattcgcatggaaagggtt

SEQ ID NO: 415 - DNA, 20 bp, Artificial Sequence
  Synthetic
ggtgtgtctagacaggagac

SEQ ID NO: 416 - DNA, 20 bp, Artificial Sequence
  Synthetic
ggttgtgtacgaccaactgg

SEQ ID NO: 417 - DNA, 20 bp, Artificial Sequence
  Synthetic
gagaggagaaaggagagggt

SEQ ID NO: 418 - DNA, 20 bp, Artificial Sequence
  Synthetic
gacatgggcaataacagggt

SEQ ID NO: 419 - DNA, 20 bp, Artificial Sequence
  Synthetic
gcctgcttgatggaaaggta

SEQ ID NO: 420 - DNA, 20 bp, Artificial Sequence
  Synthetic
ggcatctgaaaccaggagga

SEQ ID NO: 421 - DNA, 20 bp, Artificial Sequence
  Synthetic
ggtgggaagagagagagaga

SEQ ID NO: 422 - DNA, 20 bp, Artificial Sequence
  Synthetic
ggctcaagaactgaaagggt

SEQ ID NO: 423 - DNA, 20 bp, Artificial Sequence
  Synthetic
ggaggagagagagagagggt

SEQ ID NO: 424 - DNA, 20 bp, Artificial Sequence
  Synthetic
gctgataaggtagaaaggta

SEQ ID NO: 425 - DNA, 20 bp, Artificial Sequence
  Synthetic
ggttcaggatgagtggaggc

SEQ ID NO: 426 - DNA, 20 bp, Artificial Sequence
  Synthetic
ggagccaagagaagggctgc

SEQ ID NO: 427 - DNA, 20 bp, Artificial Sequence
  Synthetic
ggctacatacagtctaggtt

SEQ ID NO: 428 - DNA, 20 bp, Artificial Sequence
  Synthetic
gaggaaggactgagaagact

SEQ ID NO: 429 - DNA, 20 bp, Artificial Sequence
  Synthetic
ggttcctttcggcaccttgg

SEQ ID NO: 430 - DNA, 20 bp, Artificial Sequence
  Synthetic
ggaaggcatctctgggaagc

SEQ ID NO: 431 - DNA, 20 bp, Artificial Sequence
  Synthetic
gctaacgtgtagtctcgttg

SEQ ID NO: 432 - DNA, 20 bp, Artificial Sequence
  Synthetic
gtttgaaactccaggttaat

SEQ ID NO: 433 - DNA, 20 bp, Artificial Sequence
  Synthetic
gaggagttgatagttgttcc

SEQ ID NO: 434 - DNA, 20 bp, Artificial Sequence
  Synthetic
gtgcaagaattcagtccaca

SEQ ID NO: 435 - DNA, 20 bp, Artificial Sequence
  Synthetic
gagaataaagtgttgtgccg

SEQ ID NO: 436 - DNA, 20 bp, Artificial Sequence
  Synthetic
gaagctctcaaggcgagaaa

SEQ ID NO: 437 - DNA, 20 bp, Artificial Sequence
  Synthetic
gatttgaccatctcttgccg

SEQ ID NO: 438 - DNA, 20 bp, Artificial Sequence
  Synthetic
gtcactgctctttaccaaga

SEQ ID NO: 439 - DNA, 20 bp, Artificial Sequence
  Synthetic
gggatatgctcactttggga

SEQ ID NO: 440 - DNA, 20 bp, Artificial Sequence
  Synthetic
gaaggaactaagtttcttct

SEQ ID NO: 441 - DNA, 20 bp, Artificial Sequence
  Synthetic
gatgacggtcggccgtagtt

SEQ ID NO: 442 - DNA, 20 bp, Artificial Sequence
  Synthetic
gattctcaggcagggctcta

SEQ ID NO: 443 - DNA, 20 bp, Artificial Sequence
  Synthetic
gctctttcctctaacagccc

SEQ ID NO: 444 - DNA, 20 bp, Artificial Sequence
  Synthetic
accgcactgagattcggatg

SEQ ID NO: 445 - DNA, 21 bp, Artificial Sequence
  Synthetic
gaaccttacgaacctttgggc

SEQ ID NO: 446 - DNA, 24 bp, Artificial Sequence
  Synthetic
aagaagatgagcaaggtggagacg

SEQ ID NO: 447 - DNA, 19 bp, Artificial Sequence
  Synthetic
gagatggtgggcgacagga

SEQ ID NO: 448 - DNA, 20 bp, Artificial Sequence
  Synthetic
tttcctcaaatgccctaagc

SEQ ID NO: 449 - DNA, 20 bp, Artificial Sequence
  Synthetic
ggaggggtcatccttttctc

SEQ ID NO: 450 - DNA, 20 bp, Artificial Sequence
  Synthetic
agtcagcatgagggagatcg

SEQ ID NO: 451 - DNA, 20 bp, Artificial Sequence
  Synthetic
agtcccctacatagttgccg

SEQ ID NO: 452 - DNA, 20 bp, Artificial Sequence
  Synthetic
agcactgattgggaagcact

SEQ ID NO: 453 - DNA, 33 bp, Artificial Sequence
  Synthetic
caattcaaggaagttgtaaagtagtgaagtttg

SEQ ID NO: 454 - DNA, 24 bp, Artificial Sequence
  Synthetic
aaccaaaggatgaagtgcaagcgg

SEQ ID NO: 455 - DNA, 24 bp, Artificial Sequence
  Synthetic
tccaagttgggttggtccaagtct

SEQ ID NO: 456 - DNA, 20 bp, Artificial Sequence
  Synthetic
aagctcttcgagtgcatgac

SEQ ID NO: 457 - DNA, 20 bp, Artificial Sequence
  Synthetic
ttgttgagccggatcttgtc

SEQ ID NO: 458 - DNA, 20 bp, Artificial Sequence
  Synthetic
acaagagaattgggaggggt

SEQ ID NO: 459 - DNA, 20 bp, Artificial Sequence
  Synthetic
ttttctagtcggcatcaccg

SEQ ID NO: 460 - DNA, 19 bp, Artificial Sequence
  Synthetic
ccttcggtcttttcgagga

SEQ ID NO: 461 - DNA, 18 bp, Artificial Sequence
  Synthetic
cttggcctccagcagctc

SEQ ID NO: 462 - DNA, 19 bp, Artificial Sequence
  Synthetic
acgtagaaggctgctggaa

SEQ ID NO: 463 - DNA, 18 bp, Artificial Sequence
  Synthetic
tgtccagtctcgcgacca

SEQ ID NO: 464 - DNA, 20 bp, Artificial Sequence
  Synthetic
aaaagaacagccacccacac

SEQ ID NO: 465 - DNA, 20 bp, Artificial Sequence
  Synthetic
cgtcccagtcacagtggtaa

SEQ ID NO: 466 - DNA, 23 bp, Artificial Sequence
  Synthetic
catcggttcggtaaagtttctgt

SEQ ID NO: 467 - DNA, 20 bp, Artificial Sequence
  Synthetic
ccactcagccacagaaatcg

SEQ ID NO: 468 - DNA, 20 bp, Artificial Sequence
  Synthetic
tgaagcagagttccaacgtg

SEQ ID NO: 469 - DNA, 20 bp, Artificial Sequence
  Synthetic
ttgctcatccaagaccagaa

SEQ ID NO: 470 - DNA, 20 bp, Artificial Sequence
  Synthetic
tgaagatgctccaggctaca

SEQ ID NO: 471 - DNA, 20 bp, Artificial Sequence
  Synthetic
tctgtcaagcactctcggaa

SEQ ID NO: 472 - DNA, 20 bp, Artificial Sequence
  Synthetic
tctcttcaccaaggccattc

SEQ ID NO: 473 - DNA, 20 bp, Artificial Sequence
  Synthetic
tatgttccaaagtcctccga

SEQ ID NO: 474 - DNA, 19 bp, Artificial Sequence
  Synthetic
agtcgaggtgcagacgtac

SEQ ID NO: 475 - DNA, 19 bp, Artificial Sequence
  Synthetic
ttgcctagggagcctgact

SEQ ID NO: 476 - DNA, 20 bp, Artificial Sequence
  Synthetic
caacagtgctcccaacagtc

SEQ ID NO: 477 - DNA, 19 bp, Artificial Sequence
  Synthetic
ttgatgtagcccagcacgc

SEQ ID NO: 478 - DNA, 20 bp, Artificial Sequence
  Synthetic
acggagaagctctgcaagaa

SEQ ID NO: 479 - DNA, 22 bp, Artificial Sequence
  Synthetic
ttgtcttgatcatcctggatgg

SEQ ID NO: 480 - DNA, 20 bp, Artificial Sequence
  Synthetic
actcggctgtgttctggaag

SEQ ID NO: 481 - DNA, 20 bp, Artificial Sequence
  Synthetic
tgggtagcatttcccaagag

SEQ ID NO: 482 - DNA, 20 bp, Artificial Sequence
  Synthetic
ttggactgtgaagcaaggca

SEQ ID NO: 483 - DNA, 19 bp, Artificial Sequence
  Synthetic
actccggaggcgattaagg

SEQ ID NO: 484 - DNA, 19 bp, Artificial Sequence
  Synthetic
ctgaacggcgagatcagtg

SEQ ID NO: 485 - DNA, 20 bp, Artificial Sequence
  Synthetic
tttcctcttgcctcctgaag

SEQ ID NO: 486 - DNA, 19 bp, Artificial Sequence
  Synthetic
aacacgaatcccagctcgt

SEQ ID NO: 487 - DNA, 24 bp, Artificial Sequence
  Synthetic
ggatctggaatttcgaataagggc

SEQ ID NO: 488 - DNA, 29 bp, Artificial Sequence
  Synthetic
cctgagactaatactgtatgatttggaaa

SEQ ID NO: 489 - DNA, 26 bp, Artificial Sequence
  Synthetic
cacaggtttagagataaccaaagtgg

SEQ ID NO: 490 - DNA, 20 bp, Artificial Sequence
  Synthetic
gagtggatggtgaagagcgt

SEQ ID NO: 491 - DNA, 20 bp, Artificial Sequence
  Synthetic
tgctgtgaagggacagattg

SEQ ID NO: 492 - DNA, 20 bp, Artificial Sequence
  Synthetic
ccaacaggaactgtcccatc

SEQ ID NO: 493 - DNA, 19 bp, Artificial Sequence
  Synthetic
attcttcctcgctgaaccg

SEQ ID NO: 494 - DNA, 20 bp, Artificial Sequence
  Synthetic
cggcttcagaagacttcacc

SEQ ID NO: 495 - DNA, 20 bp, Artificial Sequence
  Synthetic
ggcctagtggtatgggatga

SEQ ID NO: 496 - DNA, 21 bp, Artificial Sequence
  Synthetic
gcagcatcttgattctggaac

SEQ ID NO: 497 - DNA, 21 bp, Artificial Sequence
  Synthetic
tgtcaagttggcttccacttt

SEQ ID NO: 498 - DNA, 20 bp, Artificial Sequence
  Synthetic
tttcctcaaatgccctaagc

SEQ ID NO: 499 - DNA, 20 bp, Artificial Sequence
  Synthetic
ggaggggtcatccttttctc

SEQ ID NO: 500 - DNA, 20 bp, Artificial Sequence
  Synthetic
acttctgtgagctcattgcg

SEQ ID NO: 501 - DNA, 20 bp, Artificial Sequence
  Synthetic
cgactgcattcagggtcttt

SEQ ID NO: 502 - DNA, 19 bp, Artificial Sequence
  Synthetic
gtggcaagatgctgagctc

SEQ ID NO: 503 - DNA, 23 bp, Artificial Sequence
  Synthetic
cattggacaaacctcaccagtac

SEQ ID NO: 504 - DNA, 19 bp, Artificial Sequence
  Synthetic
gctagaaggactgcggagc

SEQ ID NO: 505 - DNA, 21 bp, Artificial Sequence
  Synthetic
attgagcttgaatacagggca

SEQ ID NO: 506 - DNA, 20 bp, Artificial Sequence
  Synthetic
ggcgactacagctaacccag

SEQ ID NO: 507 - DNA, 20 bp, Artificial Sequence
  Synthetic
gccctctgtacaacagctcc

SEQ ID NO: 508 - DNA, 18 bp, Artificial Sequence
  Synthetic
agcgcagcttgctaaacc

SEQ ID NO: 509 - DNA, 20 bp, Artificial Sequence
  Synthetic
gcttttgacaacatctgggg

SEQ ID NO: 510 - DNA, 20 bp, Artificial Sequence
  Synthetic
agagttcggacagttcctgc

SEQ ID NO: 511 - DNA, 20 bp, Artificial Sequence
  Synthetic
tcctcattcttctgcccact

SEQ ID NO: 512 - DNA, 20 bp, Artificial Sequence
  Synthetic
gaaaagtagcccccaacctc

SEQ ID NO: 513 - DNA, 20 bp, Artificial Sequence
  Synthetic
aatcagacaggggacacagc

SEQ ID NO: 514 - DNA, 20 bp, Artificial Sequence
  Synthetic
tcgaaattccagaacaagca

SEQ ID NO: 515 - DNA, 21 bp, Artificial Sequence
  Synthetic
tgtggaagaaaccggtaaatg

SEQ ID NO: 516 - DNA, 20 bp, Artificial Sequence
  Synthetic
ccataaagaatctcagcgcc

SEQ ID NO: 517 - DNA, 20 bp, Artificial Sequence
  Synthetic
ccatatcggggtagttgtgg

SEQ ID NO: 518 - DNA, 20 bp, Artificial Sequence
  Synthetic
ggacaacctgacttccttgg

SEQ ID NO: 519 - DNA, 20 bp, Artificial Sequence
  Synthetic
ctggacggaggagaactcac

SEQ ID NO: 520 - DNA, 20 bp, Artificial Sequence
  Synthetic
tctgcaccttctgtctcagc

SEQ ID NO: 521 - DNA, 20 bp, Artificial Sequence
  Synthetic
aaccagggatccaggttcat

SEQ ID NO: 522 - DNA, 25 bp, Artificial Sequence
  Synthetic
acagagaatggaatgtatgcatgtg

SEQ ID NO: 523 - DNA, 20 bp, Artificial Sequence
  Synthetic
agattccacactcgtgaggc

SEQ ID NO: 524 - DNA, 20 bp, Artificial Sequence
  Synthetic
gcaacggtttctgtcaggat

SEQ ID NO: 525 - DNA, 20 bp, Artificial Sequence
  Synthetic
ggttcgttgttcagctcgat

SEQ ID NO: 526 - DNA, 20 bp, Artificial Sequence
  Synthetic
acagcatgagatccaaaggc

SEQ ID NO: 527 - DNA, 20 bp, Artificial Sequence
  Synthetic
ttatcccatctgcatcagca

SEQ ID NO: 528 - DNA, 20 bp, Artificial Sequence
  Synthetic
aaatcctccgccaacactaa

SEQ ID NO: 529 - DNA, 20 bp, Artificial Sequence
  Synthetic
tgtaagtttgtcgaccgctg

SEQ ID NO: 530 - DNA, 20 bp, Artificial Sequence
  Synthetic
gtgcactactgaatccaaga

SEQ ID NO: 531 - DNA, 20 bp, Artificial Sequence
  Synthetic
gtcaatcagtagcaggcaaa

SEQ ID NO: 532 - DNA, 20 bp, Artificial Sequence
  Synthetic
gaagacttcactcatcttgg

SEQ ID NO: 533 - DNA, 20 bp, Artificial Sequence
  Synthetic
gtctcagcgatcggattgct

SEQ ID NO: 534 - DNA, 20 bp, Artificial Sequence
  Synthetic
gaagtatatcatagtttcgg

SEQ ID NO: 535 - DNA, 20 bp, Artificial Sequence
  Synthetic
gtttggagtttgagcatcct

SEQ ID NO: 536 - DNA, 20 bp, Artificial Sequence
  Synthetic
gtgtaagggatctttgttac

SEQ ID NO: 537 - DNA, 20 bp, Artificial Sequence
  Synthetic
gtgtttatgaaagtgtatgg

SEQ ID NO: 538 - DNA, 20 bp, Artificial Sequence
  Synthetic
gataactgaacagggagtgg

SEQ ID NO: 539 - DNA, 20 bp, Artificial Sequence
  Synthetic
gttcggccctctgattggac

SEQ ID NO: 540 - DNA, 20 bp, Artificial Sequence
  Synthetic
gccacctaggagaagaagtg

SEQ ID NO: 541 - DNA, 20 bp, Artificial Sequence
  Synthetic
ggtttcctttagcttagact

SEQ ID NO: 542 - DNA, 20 bp, Artificial Sequence
  Synthetic
gttacaatagactttgaggc

SEQ ID NO: 543 - DNA, 20 bp, Artificial Sequence
  Synthetic
ggcaggtattaatactcaag

SEQ ID NO: 544 - DNA, 20 bp, Artificial Sequence
  Synthetic
gtttacatccaggctttgag

SEQ ID NO: 545 - DNA, 20 bp, Artificial Sequence
  Synthetic
gtttggctgtctagtgacgg

SEQ ID NO: 546 - DNA, 20 bp, Artificial Sequence
  Synthetic
gattctgtggaattgggttg

SEQ ID NO: 547 - DNA, 20 bp, Artificial Sequence
  Synthetic
gctcagtctcatctccactg

SEQ ID NO: 548 - DNA, 20 bp, Artificial Sequence
  Synthetic
gttatggtttcaggctggaa

SEQ ID NO: 549 - DNA, 20 bp, Artificial Sequence
  Synthetic
gactcttctgctcagtttgc

SEQ ID NO: 550 - DNA, 20 bp, Artificial Sequence
  Synthetic
ggtcgtcgccttatagccgg

SEQ ID NO: 551 - DNA, 20 bp, Artificial Sequence
  Synthetic
gaagtgacaggatcagctat

SEQ ID NO: 552 - DNA, 20 bp, Artificial Sequence
  Synthetic
gtgacaggtgatctaggcgc

SEQ ID NO: 553 - DNA, 20 bp, Artificial Sequence
  Synthetic
ggaaccttgttgctagggcc

SEQ ID NO: 554 - DNA, 20 bp, Artificial Sequence
  Synthetic
gaccagttcactgaaagatg

SEQ ID NO: 555 - DNA, 20 bp, Artificial Sequence
  Synthetic
ggcagttctcttgcctagtg

SEQ ID NO: 556 - DNA, 20 bp, Artificial Sequence
  Synthetic
gaggtgagagttagtaagtc

SEQ ID NO: 557 - DNA, 20 bp, Artificial Sequence
  Synthetic
gtcatcaaagaaagaatggc

SEQ ID NO: 558 - DNA, 79 bp, Artificial Sequence
  Synthetic
  misc_feature (19)..(38): n is a, c, g, or t
tggaaagccagaaacatgnnnnnnnnnnnnnnnnnnnngttttagagctagaaatagcaagttaaaataaggctagtcc

SEQ ID NO: 559 - DNA, 28 bp, Artificial Sequence
  Synthetic
gatcctagtactcgaggtacctctaggc

SEQ ID NO: 560 - DNA, 45 bp, Artificial Sequence
  Synthetic
accgtattaccgccagccttttgctcattaattaaggtaccgagg

SEQ ID NO: 561 - DNA, 47 bp, Artificial Sequence
  Synthetic
tgacgggcacatgcatggtacctctaggctagcgaattcaaaaaaag

SEQ ID NO: 562 - DNA, 21 bp, Artificial Sequence
  Synthetic
gaacgactagttaggcgtgta

SEQ ID NO: 563 - DNA, 20 bp, Artificial Sequence
  Synthetic
gtttagtagttcgtcacacc

SEQ ID NO: 564 - DNA, 20 bp, Artificial Sequence
  Synthetic
gcgacatgtctgttgggcga

SEQ ID NO: 565 - DNA, 20 bp, Artificial Sequence
  Synthetic
gtatataagccgggcgcacg

SEQ ID NO: 566 - DNA, 20 bp, Artificial Sequence
  Synthetic
gtcgaaccacgcgttgatcg

SEQ ID NO: 567 - DNA, 20 bp, Artificial Sequence
  Synthetic
gacccatgacggtcgacgga

SEQ ID NO: 568 - DNA, 20 bp, Artificial Sequence
  Synthetic
ggttcaggatgagtggaggc

SEQ ID NO: 569 - DNA, 20 bp, Artificial Sequence
  Synthetic
gaggaatcgagaacttaatt

SEQ ID NO: 570 - DNA, 20 bp, Artificial Sequence
  Synthetic
gctctgcaggacacccatgt

SEQ ID NO: 571 - DNA, 20 bp, Artificial Sequence
  Synthetic
gtggtcaaggtagacaccta

SEQ ID NO: 572 - DNA, 20 bp, Artificial Sequence
  Synthetic
gagtcacattgatcctgcaa

SEQ ID NO: 573 - DNA, 20 bp, Artificial Sequence
  Synthetic
gaatcaggaaggctgtagca

SEQ ID NO: 574 - DNA, 20 bp, Artificial Sequence
  Synthetic
gtctggacaggacaaccctt

SEQ ID NO: 575 - DNA, 20 bp, Artificial Sequence
  Synthetic
gagtgcctgtctgcaaggga

SEQ ID NO: 576 - DNA, 20 bp, Artificial Sequence
  Synthetic
gctgtaaggtgacccagact

SEQ ID NO: 577 - DNA, 20 bp, Artificial Sequence
  Synthetic
ggttagtgggctccaagtgt

SEQ ID NO: 578 - DNA, 20 bp, Artificial Sequence
  Synthetic
ggtgagtgagtgacaccctc

SEQ ID NO: 579 - DNA, 20 bp, Artificial Sequence
  Synthetic
gaaaggacctgtggacagtt

SEQ ID NO: 580 - DNA, 20 bp, Artificial Sequence
  Synthetic
gcaagagggtaatagagaga

SEQ ID NO: 581 - DNA, 90 bp, Artificial Sequence
  Synthetic
  misc_feature (64)..(69): n is a, c, g, or t
aatgatacggcgaccaccgagatctacacagatcggaagagcacacgtctgaactccagtcacnnnnnngcacaaaaggaaactcaccct

SEQ ID NO: 582 - DNA, 44 bp, Artificial Sequence
  Synthetic
caagcagaagacggcatacgagatcgactcggtgccactttttc

SEQ ID NO: 583 - DNA, 45 bp, Artificial Sequence
  Synthetic
gtgtgttttgagactataagtatcccttggagaaccaccttgttg

SEQ ID NO: 584 - DNA, 47 bp, Artificial Sequence
  Synthetic
caagcagaagacggcatacgagatggtacctctaggctagcgaattc

SEQ ID NO: 585 - DNA, 59 bp, Artificial Sequence
  Synthetic
ccactttttcaagttgataacggactagccttattttaacttgctatttctagctctaa

SEQ ID NO: 586 - DNA, 20 bp, Artificial Sequence
  Synthetic
gttgctggttgatgaagttg

SEQ ID NO: 587 - DNA, 20 bp, Artificial Sequence
  Synthetic
gcagttccaagtaccggtgc

SEQ ID NO: 588 - DNA, 20 bp, Artificial Sequence
  Synthetic
ggaaggcagcgccattctgg

SEQ ID NO: 589 - DNA, 20 bp, Artificial Sequence
  Synthetic
gactcagaggacccaagaaa

SEQ ID NO: 590 - DNA, 20 bp, Artificial Sequence
  Synthetic
gggtcgagtccaggatgagt

SEQ ID NO: 591 - DNA, 20 bp, Artificial Sequence
  Synthetic
ggtggacttgcttgcagggt

SEQ ID NO: 592 - DNA, 20 bp, Artificial Sequence
  Synthetic
ggatgatgaagaagaggagg

SEQ ID NO: 593 - DNA, 20 bp, Artificial Sequence
  Synthetic
gcacacactccgactcatcc

SEQ ID NO: 594 - DNA, 20 bp, Artificial Sequence
  Synthetic
ggctccttggcacagtactc

SEQ ID NO: 595 - DNA, 20 bp, Artificial Sequence
  Synthetic
gaacctggtttaatccagct

SEQ ID NO: 596 - DNA, 20 bp, Artificial Sequence
  Synthetic
ggtagagaatggccaaagcc

SEQ ID NO: 597 - DNA, 20 bp, Artificial Sequence
  Synthetic
gtcccatataggaacactgc

SEQ ID NO: 598 - DNA, 20 bp, Artificial Sequence
  Synthetic
gtttctagagaaatcacgtt

SEQ ID NO: 599 - DNA, 20 bp, Artificial Sequence
  Synthetic
gctgggtctggtagacaccc

SEQ ID NO: 600 - DNA, 20 bp, Artificial Sequence
  Synthetic
gaagccagaagccagtaaga

SEQ ID NO: 601 - DNA, 20 bp, Artificial Sequence
  Synthetic
gtgaagaccacgaggcattg

SEQ ID NO: 602 - DNA, 20 bp, Artificial Sequence
  Synthetic
gtacaggaaggttcctggtg

SEQ ID NO: 603 - DNA, 20 bp, Artificial Sequence
  Synthetic
ggagtcttaaggcagctgcc

SEQ ID NO: 604 - DNA, 20 bp, Artificial Sequence
  Synthetic
gatgtcacttccctaggcat

SEQ ID NO: 605 - DNA, 20 bp, Artificial Sequence
  Synthetic
ggcacagcgggttagagcac

SEQ ID NO: 606 - DNA, 20 bp, Artificial Sequence
  Synthetic
gagcactcaaagggtccaag

SEQ ID NO: 607 - DNA, 20 bp, Artificial Sequence
  Synthetic
gagggatcacacaacagcac

SEQ ID NO: 608 - DNA, 20 bp, Artificial Sequence
  Synthetic
gtcatacttggactgaattt

SEQ ID NO: 609 - DNA, 20 bp, Artificial Sequence
  Synthetic
gagtggagagctctcctcac

SEQ ID NO: 610 - DNA, 20 bp, Artificial Sequence
  Synthetic
ggaattcgagcagaggagct

SEQ ID NO: 611 - DNA, 20 bp, Artificial Sequence
  Synthetic
gacagagagggtgagggtga

SEQ ID NO: 612 - DNA, 20 bp, Artificial Sequence
  Synthetic
ggtgatcgccagtaccctcg

SEQ ID NO: 613 - DNA, 20 bp, Artificial Sequence
  Synthetic
ggatgtcacttccctaggca

SEQ ID NO: 614 - DNA, 20 bp, Artificial Sequence
  Synthetic
gcctggacacccaggcttca

SEQ ID NO: 615 - DNA, 20 bp, Artificial Sequence
  Synthetic
gaggaagccttagagactgc

SEQ ID NO: 616 - DNA, 20 bp, Artificial Sequence
  Synthetic
gattctggtatcccggaggc

SEQ ID NO: 617 - DNA, 20 bp, Artificial Sequence
  Synthetic
ggcctctgattctggtatcc

SEQ ID NO: 618 - DNA, 20 bp, Artificial Sequence
  Synthetic
gagtctgtggccttgggact

SEQ ID NO: 619 - DNA, 20 bp, Artificial Sequence
  Synthetic
gtctctgtctgtctcaggta

SEQ ID NO: 620 - DNA, 20 bp, Artificial Sequence
  Synthetic
gacacctgtcccacagaggt

SEQ ID NO: 621 - DNA, 20 bp, Artificial Sequence
  Synthetic
ggatgggacaccactgaggg

SEQ ID NO: 622 - DNA, 20 bp, Artificial Sequence
  Synthetic
gactcagcagcttaagagga

SEQ ID NO: 623 - DNA, 20 bp, Artificial Sequence
  Synthetic
gatgagaaggaaagaagcac

SEQ ID NO: 624 - DNA, 20 bp, Artificial Sequence
  Synthetic
gcccaagcagaaatgagatc

SEQ ID NO: 625 - DNA, 20 bp, Artificial Sequence
  Synthetic
gttgagtgccatgtaagtta

SEQ ID NO: 626 - DNA, 20 bp, Artificial Sequence
  Synthetic
gccttccttgttgaaataac

SEQ ID NO: 627 - DNA, 20 bp, Artificial Sequence
  Synthetic
gcagagatgataaaggaaga

SEQ ID NO: 628 - DNA, 20 bp, Artificial Sequence
  Synthetic
ggaaatgacaacaggaaagt

SEQ ID NO: 629 - DNA, 20 bp, Artificial Sequence
  Synthetic
gatttaatgggagtgatgag

SEQ ID NO: 630 - DNA, 20 bp, Artificial Sequence
  Synthetic
gtcatcacgtgctgcgaaga

SEQ ID NO: 631 - DNA, 20 bp, Artificial Sequence
  Synthetic
gtcctttaataaggtcttcc

SEQ ID NO: 632 - DNA, 20 bp, Artificial Sequence
  Synthetic
gaatgtgtatgccctgtgat

SEQ ID NO: 633 - DNA, 20 bp, Artificial Sequence
  Synthetic
gggaagctcctgctacccag

SEQ ID NO: 634 - DNA, 20 bp, Artificial Sequence
  Synthetic
gtgtgaaataccttaagagt

SEQ ID NO: 635 - DNA, 20 bp, Artificial Sequence
  Synthetic
gtcagaaccttgcatagatg

SEQ ID NO: 636 - DNA, 20 bp, Artificial Sequence
  Synthetic
gaggcatctggaagtgcaga

SEQ ID NO: 637 - DNA, 20 bp, Artificial Sequence
  Synthetic
ggatttggtgcacaaactgg

SEQ ID NO: 638 - DNA, 20 bp, Artificial Sequence
  Synthetic
gtgcctaggtggaaggtggg

SEQ ID NO: 639 - DNA, 20 bp, Artificial Sequence
  Synthetic
ggtgggagggactggatgag

SEQ ID NO: 640 - DNA, 20 bp, Artificial Sequence
  Synthetic
gggtagcaggagcttcccag

SEQ ID NO: 641 - DNA, 20 bp, Artificial Sequence
  Synthetic
gtacaatctcactttgctgg

SEQ ID NO: 642 - DNA, 20 bp, Artificial Sequence
  Synthetic
gcaccacgacacccaaggaa

SEQ ID NO: 643 - DNA, 20 bp, Artificial Sequence
  Synthetic
gggcccagctttcgaaagct

SEQ ID NO: 644 - DNA, 20 bp, Artificial Sequence
  Synthetic
gaacagggagcaagggactg

SEQ ID NO: 645 - DNA, 20 bp, Artificial Sequence
  Synthetic
gcttggaggccctgtctttc

SEQ ID NO: 646 - DNA, 20 bp, Artificial Sequence
  Synthetic
gagattcctcactggcatga

SEQ ID NO: 647 - DNA, 20 bp, Artificial Sequence
  Synthetic
gtttagcctagagccaatca

SEQ ID NO: 648 - DNA, 20 bp, Artificial Sequence
  Synthetic
ggtcagtcacttcagagccg

SEQ ID NO: 649 - DNA, 20 bp, Artificial Sequence
  Synthetic
gctagagactgccctgcctt

SEQ ID NO: 650 - DNA, 20 bp, Artificial Sequence
  Synthetic
gcggctgttaaccggcttgc

SEQ ID NO: 651 - DNA, 20 bp, Artificial Sequence
  Synthetic
gggcacaaggccaagcagaa

SEQ ID NO: 652 - DNA, 20 bp, Artificial Sequence
  Synthetic
gcatccgacagcaaacgaga

SEQ ID NO: 653 - DNA, 20 bp, Artificial Sequence
  Synthetic
gacagcaaacgagaaggcca

SEQ ID NO: 654 - DNA, 20 bp, Artificial Sequence
  Synthetic
gggagtcagggctctaagat

SEQ ID NO: 655 - DNA, 20 bp, Artificial Sequence
  Synthetic
gtcgaggcgactacgattct

SEQ ID NO: 656 - DNA, 20 bp, Artificial Sequence
  Synthetic
gcagaactgttaagtgaagt

SEQ ID NO: 657 - DNA, 20 bp, Artificial Sequence
  Synthetic
gttgcttgctccaccttctc

SEQ ID NO: 658 - DNA, 20 bp, Artificial Sequence
  Synthetic
gacaaatgccaggagagaca

SEQ ID NO: 659 - DNA, 20 bp, Artificial Sequence
  Synthetic
gaagcttgaaataacaggct

SEQ ID NO: 660 - DNA, 20 bp, Artificial Sequence
  Synthetic
gagaagagaggcctctactg

SEQ ID NO: 661 - DNA, 20 bp, Artificial Sequence
  Synthetic
gaatggagagtcttgtaggg

SEQ ID NO: 662 - DNA, 20 bp, Artificial Sequence
  Synthetic
gctgtaaatcaaggccaaac

SEQ ID NO: 663 - DNA, 20 bp, Artificial Sequence
  Synthetic
gactgcaggctaggcagaga

SEQ ID NO: 664 - DNA, 20 bp, Artificial Sequence
  Synthetic
ggtttcacagtggtctgccc

SEQ ID NO: 665 - DNA, 20 bp, Artificial Sequence
  Synthetic
gaatgttggaggagggatgg

SEQ ID NO: 666 - DNA, 20 bp, Artificial Sequence
  Synthetic
gtccttggttgagggcagtc

SEQ ID NO: 667 - DNA, 20 bp, Artificial Sequence
  Synthetic
gccataacactgtttctgat

SEQ ID NO: 668 - DNA, 20 bp, Artificial Sequence
  Synthetic
gcttaaagatcccttaggtc

SEQ ID NO: 669 - DNA, 20 bp, Artificial Sequence
  Synthetic
gtgaggagaattccaaagaa

SEQ ID NO: 670 - DNA, 20 bp, Artificial Sequence
  Synthetic
gttagctttgaggtctccat

SEQ ID NO: 671 - DNA, 20 bp, Artificial Sequence
  Synthetic
gttgaagcaaaggtcaccaa

SEQ ID NO: 672 - DNA, 20 bp, Artificial Sequence
  Synthetic
ggatgagaggagtgggaaga

SEQ ID NO: 673 - DNA, 20 bp, Artificial Sequence
  Synthetic
gaaacctgtgtctgtctctc

SEQ ID NO: 674 - DNA, 20 bp, Artificial Sequence
  Synthetic
gctggagcagattggaggta

SEQ ID NO: 675 - DNA, 20 bp, Artificial Sequence
  Synthetic
gagataggtgagattggagg

SEQ ID NO: 676 - DNA, 20 bp, Artificial Sequence
  Synthetic
gattcgacccggagaagcct

SEQ ID NO: 677 - DNA, 20 bp, Artificial Sequence
  Synthetic
ggaatttcaacagtgtggtg

SEQ ID NO: 678 - DNA, 20 bp, Artificial Sequence
  Synthetic
gtcagcatctggatgcctga

SEQ ID NO: 679 - DNA, 20 bp, Artificial Sequence
  Synthetic
gttccctaatgtctaattac

SEQ ID NO: 680 - DNA, 20 bp, Artificial Sequence
  Synthetic
gaccaatcgccgctcgcttc

SEQ ID NO: 681 - DNA, 20 bp, Artificial Sequence
  Synthetic
gaactgcggcatctgcagga

SEQ ID NO: 682 - DNA, 20 bp, Artificial Sequence
  Synthetic
gaagcgagcggcgattggtc

SEQ ID NO: 683 - DNA, 20 bp, Artificial Sequence
  Synthetic
gcccagcaagcatgacaata

SEQ ID NO: 684 - DNA, 20 bp, Artificial Sequence
  Synthetic
ggcacacgcctctaatcccg

SEQ ID NO: 685 - DNA, 20 bp, Artificial Sequence
  Synthetic
gtcttacctctgtagcatcc

SEQ ID NO: 686 - DNA, 20 bp, Artificial Sequence
  Synthetic
gtgtagggaaggctccttgg

SEQ ID NO: 687 - DNA, 20 bp, Artificial Sequence
  Synthetic
gcgttctaaatcaacctgag

SEQ ID NO: 688 - DNA, 20 bp, Artificial Sequence
  Synthetic
gacaaagcagctttcagtgt

SEQ ID NO: 689 - DNA, 20 bp, Artificial Sequence
  Synthetic
gcattgttctttgtggacat

SEQ ID NO: 690 - DNA, 20 bp, Artificial Sequence
  Synthetic
gaaagaggaagactgagccc

SEQ ID NO: 691 - DNA, 20 bp, Artificial Sequence
  Synthetic
gtgagagagagcagtttcca

SEQ ID NO: 692 - DNA, 20 bp, Artificial Sequence
  Synthetic
gtattctttctcctctgtgg

SEQ ID NO: 693 - DNA, 20 bp, Artificial Sequence
  Synthetic
gctaattggtatttgactga

SEQ ID NO: 694 - DNA, 20 bp, Artificial Sequence
  Synthetic
gagaacaacctgtgtgggta

SEQ ID NO: 695 - DNA, 20 bp, Artificial Sequence
  Synthetic
gtttccctgtctcagggata

SEQ ID NO: 696 - DNA, 20 bp, Artificial Sequence
  Synthetic
gggtgcgcgggagaaccaaa

SEQ ID NO: 697 - DNA, 20 bp, Artificial Sequence
  Synthetic
gatctccaaacctgatggtc

SEQ ID NO: 698 - DNA, 20 bp, Artificial Sequence
  Synthetic
ggctacctggcagtgaggaa

SEQ ID NO: 699 - DNA, 20 bp, Artificial Sequence
  Synthetic
gggctggagagatggctcag

SEQ ID NO: 700 - DNA, 20 bp, Artificial Sequence
  Synthetic
ggtttccctgtctcagggat

SEQ ID NO: 701 - DNA, 20 bp, Artificial Sequence
  Synthetic
ggagagatggctcagtgggc

SEQ ID NO: 702 - DNA, 20 bp, Artificial Sequence
  Synthetic
ggtcaagatttcctgattaa

SEQ ID NO: 703 - DNA, 20 bp, Artificial Sequence
  Synthetic
ggctggagaggtggctcagt

SEQ ID NO: 704 - DNA, 20 bp, Artificial Sequence
  Synthetic
gatcaatcatggttagccag

SEQ ID NO: 705 - DNA, 20 bp, Artificial Sequence
  Synthetic
gcctagtcagctcctggaga

SEQ ID NO: 706 - DNA, 20 bp, Artificial Sequence
  Synthetic
ggctttagagaacgtagtgc

SEQ ID NO: 707 - DNA, 20 bp, Artificial Sequence
  Synthetic
gcacagaggtaaactccctt

SEQ ID NO: 708 - DNA, 20 bp, Artificial Sequence
  Synthetic
gaaacttcaccgaagaggaa

SEQ ID NO: 709 - DNA, 20 bp, Artificial Sequence
  Synthetic
gggtctacaacctttctcta

SEQ ID NO: 710 - DNA, 20 bp, Artificial Sequence
  Synthetic
gagttaactgaaacctcaag

SEQ ID NO: 711 - DNA, 20 bp, Artificial Sequence
  Synthetic
ggagttaactgaaacctcaa

SEQ ID NO: 712 - DNA, 20 bp, Artificial Sequence
  Synthetic
gcccaccaggacaagcagaa

SEQ ID NO: 713 - DNA, 20 bp, Artificial Sequence
  Synthetic
gcgtcccttaagcttctgta

SEQ ID NO: 714 - DNA, 20 bp, Artificial Sequence
  Synthetic
gctggtatgtgggaggagcc

SEQ ID NO: 715 - DNA, 20 bp, Artificial Sequence
  Synthetic
gaccaatggaaatggcaata

SEQ ID NO: 716 - DNA, 20 bp, Artificial Sequence
  Synthetic
gggctctggtaggagattac

SEQ ID NO: 717 - DNA, 20 bp, Artificial Sequence
  Synthetic
gattggtcgtctgtggcttc

SEQ ID NO: 718 - DNA, 20 bp, Artificial Sequence
  Synthetic
gcaatggtattgaagaggca

SEQ ID NO: 719 - DNA, 20 bp, Artificial Sequence
  Synthetic
gcgcaagagttcccaggagg

SEQ ID NO: 720 - DNA, 20 bp, Artificial Sequence
  Synthetic
gaggctttgggagactgcta

SEQ ID NO: 721 - DNA, 20 bp, Artificial Sequence
  Synthetic
gtaggagattactggaactc

SEQ ID NO: 722 - DNA, 20 bp, Artificial Sequence
  Synthetic
gaatctgggtatttctgacc

SEQ ID NO: 723 - DNA, 20 bp, Artificial Sequence
  Synthetic
gcttcgtcggcccttaggac

SEQ ID NO: 724 - DNA, 20 bp, Artificial Sequence
  Synthetic
gaagtcagtgaaagggagca

SEQ ID NO: 725 - DNA, 20 bp, Artificial Sequence
  Synthetic
gctagttactgaagacgttc

SEQ ID NO: 726 - DNA, 20 bp, Artificial Sequence
  Synthetic
ggaacatggcacctgaccag

SEQ ID NO: 727 - DNA, 20 bp, Artificial Sequence
  Synthetic
gagtttaaactttcaaaggc

SEQ ID NO: 728 - DNA, 20 bp, Artificial Sequence
  Synthetic
gtctgtttcttaagaaatgc

SEQ ID NO: 729 - DNA, 20 bp, Artificial Sequence
  Synthetic
gcaagggaaggtgacagagg

SEQ ID NO: 730 - DNA, 20 bp, Artificial Sequence
  Synthetic
gagaggcaggttgtaagtgg

SEQ ID NO: 731 - DNA, 20 bp, Artificial Sequence
  Synthetic
gcagggatatatttagccaa

SEQ ID NO: 732 - DNA, 20 bp, Artificial Sequence
  Synthetic
ggacctgagcaccacctatg

SEQ ID NO: 733 - DNA, 20 bp, Artificial Sequence
  Synthetic
gtcctgggaaagcttggaaa

SEQ ID NO: 734 - DNA, 20 bp, Artificial Sequence
  Synthetic
gaggtggtgggtgtctctcc

SEQ ID NO: 735 - DNA, 20 bp, Artificial Sequence
  Synthetic
gtcccttgttagactgttgt

SEQ ID NO: 736 - DNA, 20 bp, Artificial Sequence
  Synthetic
gaaccgtgacgaccgtacct

SEQ ID NO: 737 - DNA, 20 bp, Artificial Sequence
  Synthetic
gctcctaggtacggtcgtca

SEQ ID NO: 738 - DNA, 20 bp, Artificial Sequence
  Synthetic
gggcttcaacccagcagtgg

SEQ ID NO: 739 - DNA, 20 bp, Artificial Sequence
  Synthetic
ggagaagaatgctggtgtgc

SEQ ID NO: 740 - DNA, 20 bp, Artificial Sequence
  Synthetic
gtgactttccgctcagaggt

SEQ ID NO: 741 - DNA, 20 bp, Artificial Sequence
  Synthetic
gcctagagaacatttatact

SEQ ID NO: 742 - DNA, 20 bp, Artificial Sequence
  Synthetic
gaggagggacaggcagtaag

SEQ ID NO: 743 - DNA, 20 bp, Artificial Sequence
  Synthetic
gttacatctctagagcaagg

SEQ ID NO: 744 - DNA, 20 bp, Artificial Sequence
  Synthetic
gagacgcgggctagtgaagc

SEQ ID NO: 745 - DNA, 20 bp, Artificial Sequence
  Synthetic
gtccgttgctctcggtttgg

SEQ ID NO: 746 - DNA, 20 bp, Artificial Sequence
  Synthetic
ggtaagggaaatggtcacca

SEQ ID NO: 747 - DNA, 20 bp, Artificial Sequence
  Synthetic
gctttcctcagcaagggaga

SEQ ID NO: 748 - DNA, 20 bp, Artificial Sequence
  Synthetic
gtttgccatggtagcactta

SEQ ID NO: 749 - DNA, 20 bp, Artificial Sequence
  Synthetic
gaggacctgaccagggaagt

SEQ ID NO: 750 - DNA, 20 bp, Artificial Sequence
  Synthetic
ggcagcggctttcagcagat

SEQ ID NO: 751 - DNA, 20 bp, Artificial Sequence
  Synthetic
gttcgcaggttgcccgagac

SEQ ID NO: 752 - DNA, 20 bp, Artificial Sequence
  Synthetic
gctagagtcttggatctctt

SEQ ID NO: 753 - DNA, 20 bp, Artificial Sequence
  Synthetic
gaaccggccaggaccacttc

SEQ ID NO: 754 - DNA, 20 bp, Artificial Sequence
  Synthetic
gaagtatggtcactgtctcc

SEQ ID NO: 755 - DNA, 20 bp, Artificial Sequence
  Synthetic
gaaattgtcccttggtgatc

SEQ ID NO: 756 - DNA, 20 bp, Artificial Sequence
  Synthetic
ggattagctgtggctttgaa

SEQ ID NO: 757 - DNA, 20 bp, Artificial Sequence
  Synthetic
ggctgtgtcccagatcacca

SEQ ID NO: 758 - DNA, 20 bp, Artificial Sequence
  Synthetic
gtagcttgccaaagactggg

SEQ ID NO: 759 - DNA, 20 bp, Artificial Sequence
  Synthetic
gcagatctccatacctaacc

SEQ ID NO: 760 - DNA, 20 bp, Artificial Sequence
  Synthetic
ggatggagagtgatggaggg

SEQ ID NO: 761 - DNA, 20 bp, Artificial Sequence
  Synthetic
gtctgctcggaatatgaatt

SEQ ID NO: 762 - DNA, 20 bp, Artificial Sequence
  Synthetic
gtgatgtgcaggtcataatt

SEQ ID NO: 763 - DNA, 20 bp, Artificial Sequence
  Synthetic
gtatattattcctgtagcgc

SEQ ID NO: 764 - DNA, 20 bp, Artificial Sequence
  Synthetic
gcaaaccgcgcaatgctcca

SEQ ID NO: 765 - DNA, 20 bp, Artificial Sequence
  Synthetic
ggcaccaatctttccagagt

SEQ ID NO: 766 - DNA, 20 bp, Artificial Sequence
  Synthetic
gattgcatcaggtcctggca

SEQ ID NO: 767 - DNA, 20 bp, Artificial Sequence
  Synthetic
gaggtttaatacacaatcca

SEQ ID NO: 768 - DNA, 20 bp, Artificial Sequence
  Synthetic
gaaatattcagagctgggtt

SEQ ID NO: 769 - DNA, 20 bp, Artificial Sequence
  Synthetic
ggcctatccgatactgagaa

SEQ ID NO: 770 - DNA, 20 bp, Artificial Sequence
  Synthetic
gtttgaaactccaggttaat

SEQ ID NO: 771 - DNA, 20 bp, Artificial Sequence
  Synthetic
gtgtagtggagtcgtcttta

SEQ ID NO: 772 - DNA, 20 bp, Artificial Sequence
  Synthetic
gaaacagtaagtcgccatag

SEQ ID NO: 773 - DNA, 20 bp, Artificial Sequence
  Synthetic
gagttggctctgaagctggt

SEQ ID NO: 774 - DNA, 20 bp, Artificial Sequence
  Synthetic
gtgagccgaccaactggagt

SEQ ID NO: 775 - DNA, 20 bp, Artificial Sequence
  Synthetic
gactgaccgcgcccatagtt

SEQ ID NO: 776 - DNA, 20 bp, Artificial Sequence
  Synthetic
ggattagggaaacagctggt

SEQ ID NO: 777 - DNA, 20 bp, Artificial Sequence
  Synthetic
gcatttcactgacgtcaatt

SEQ ID NO: 778 - DNA, 20 bp, Artificial Sequence
  Synthetic
ggccggattagggaaacagc

SEQ ID NO: 779 - DNA, 20 bp, Artificial Sequence
  Synthetic
gcgtgtcttctgcccaggat

SEQ ID NO: 780 - DNA, 20 bp, Artificial Sequence
  Synthetic
gagagattccttcacagaac

SEQ ID NO: 781 - DNA, 20 bp, Artificial Sequence
  Synthetic
gacgaagtggccttgctatc

SEQ ID NO: 782 - DNA, 20 bp, Artificial Sequence
  Synthetic
gaggaggagggagagctgag

SEQ ID NO: 783 - DNA, 20 bp, Artificial Sequence
  Synthetic
ggcttctccttgtgcaaacc

SEQ ID NO: 784 - DNA, 20 bp, Artificial Sequence
  Synthetic
gtgccaattggtccactcct

SEQ ID NO: 785 - DNA, 20 bp, Artificial Sequence
  Synthetic
ggtgccagtagaagataaac

SEQ ID NO: 786 - DNA, 20 bp, Artificial Sequence
  Synthetic
gtggagctgtcattcccgat

SEQ ID NO: 787 - DNA, 20 bp, Artificial Sequence
  Synthetic
ggaccaattggcacgctctg

SEQ ID NO: 788 - DNA, 20 bp, Artificial Sequence
  Synthetic
gataaattcattgttctgga

SEQ ID NO: 789 - DNA, 20 bp, Artificial Sequence
  Synthetic
gggagcttcatgtgcagagt

SEQ ID NO: 790 - DNA, 20 bp, Artificial Sequence
  Synthetic
gcagcctcacttcctggctc

SEQ ID NO: 791 - DNA, 20 bp, Artificial Sequence
  Synthetic
gctgctggtgtctgaggagt

SEQ ID NO: 792 - DNA, 20 bp, Artificial Sequence
  Synthetic
gacaacaccattcagttgtt

SEQ ID NO: 793 - DNA, 20 bp, Artificial Sequence
  Synthetic
gggtgttcatttatttctgg

SEQ ID NO: 794 - DNA, 20 bp, Artificial Sequence
  Synthetic
gcagtctggaagctcagggt

SEQ ID NO: 795 - DNA, 20 bp, Artificial Sequence
  Synthetic
ggtctggaaccggttggagg

SEQ ID NO: 796 - DNA, 20 bp, Artificial Sequence
  Synthetic
ggaggatgctattgatgggt

SEQ ID NO: 797 - DNA, 20 bp, Artificial Sequence
  Synthetic
ggtgggtgttcatttatttc

SEQ ID NO: 798 - DNA, 20 bp, Artificial Sequence
  Synthetic
gggatcggtgagagagcaat

SEQ ID NO: 799 - DNA, 20 bp, Artificial Sequence
  Synthetic
gaggtccattggtcctagaa

SEQ ID NO: 800 - DNA, 20 bp, Artificial Sequence
  Synthetic
gggaatgagggtgtccattc

SEQ ID NO: 801 - DNA, 20 bp, Artificial Sequence
  Synthetic
ggcagagtgaatattaagtt

SEQ ID NO: 802 - DNA, 20 bp, Artificial Sequence
  Synthetic
gagtattcagagaggtgaaa

SEQ ID NO: 803 - DNA, 20 bp, Artificial Sequence
  Synthetic
ggagtcctcaacgcaacttg

SEQ ID NO: 804 - DNA, 20 bp, Artificial Sequence
  Synthetic
gacccaacttcactcagggt

SEQ ID NO: 805 - DNA, 20 bp, Artificial Sequence
  Synthetic
gtcctcaacgcaacttgagg

SEQ ID NO: 806 - DNA, 20 bp, Artificial Sequence
  Synthetic
gagggaggtgggtaagaggt

SEQ ID NO: 807 - DNA, 20 bp, Artificial Sequence
  Synthetic
gatggttgcctctgacacgt

SEQ ID NO: 808 - DNA, 20 bp, Artificial Sequence
  Synthetic
gttgttgcagtgcgtgcgcc

SEQ ID NO: 809 - DNA, 20 bp, Artificial Sequence
  Synthetic
gttccctaagaagctgaggc

SEQ ID NO: 810 - DNA, 20 bp, Artificial Sequence
  Synthetic
gaggcaggagaataagttgg

SEQ ID NO: 811 - DNA, 20 bp, Artificial Sequence
  Synthetic
gatgtttgaggatgacgtca

SEQ ID NO: 812 - DNA, 20 bp, Artificial Sequence
  Synthetic
gagggaaaggctgctcagac

SEQ ID NO: 813 - DNA, 20 bp, Artificial Sequence
  Synthetic
gggcacaactcgctaagggt

SEQ ID NO: 814 - DNA, 20 bp, Artificial Sequence
  Synthetic
gcctgagacagggagggaca

SEQ ID NO: 815 - DNA, 20 bp, Artificial Sequence
  Synthetic
gctagacgctatgggaaagg

SEQ ID NO: 816 - DNA, 20 bp, Artificial Sequence
  Synthetic
gaagcagagactgtggaatg

SEQ ID NO: 817 - DNA, 20 bp, Artificial Sequence
  Synthetic
gcagtgtgtatggaggttgg

SEQ ID NO: 818 - DNA, 20 bp, Artificial Sequence
  Synthetic
gagcatgtactgccagtgtg

SEQ ID NO: 819 - DNA, 20 bp, Artificial Sequence
  Synthetic
gattgtattctctcaggtca

SEQ ID NO: 820 - DNA, 20 bp, Artificial Sequence
  Synthetic
ggtgacagttccctagggat

SEQ ID NO: 821 - DNA, 20 bp, Artificial Sequence
  Synthetic
gggaggaaacagggcagcag

SEQ ID NO: 822 - DNA, 20 bp, Artificial Sequence
  Synthetic
ggagcatgtactgccagtgt

SEQ ID NO: 823 - DNA, 20 bp, Artificial Sequence
  Synthetic
gctggctgtaaggtgcagat

SEQ ID NO: 824 - DNA, 20 bp, Artificial Sequence
  Synthetic
gcacctacctagtcctttga

SEQ ID NO: 825 - DNA, 20 bp, Artificial Sequence
  Synthetic
gccagaaggaagcgtacgcc

SEQ ID NO: 826 - DNA, 20 bp, Artificial Sequence
  Synthetic
gctggcctgttgttcaggcc

SEQ ID NO: 827 - DNA, 20 bp, Artificial Sequence
  Synthetic
gtggaagtgctggataagaa

SEQ ID NO: 828 - DNA, 20 bp, Artificial Sequence
  Synthetic
gaactatctgagaggatccc

SEQ ID NO: 829 - DNA, 20 bp, Artificial Sequence
  Synthetic
gtgacctacaaagtaaggtc

SEQ ID NO: 830 - DNA, 20 bp, Artificial Sequence
  Synthetic
gcttggagataggctggctg

SEQ ID NO: 831 - DNA, 20 bp, Artificial Sequence
  Synthetic
ggacttagcatgtccttgtg

SEQ ID NO: 832 - DNA, 20 bp, Artificial Sequence
  Synthetic
gatagcgactccagagaggt

SEQ ID NO: 833 - DNA, 20 bp, Artificial Sequence
  Synthetic
gccaaggtcagagcatggat

SEQ ID NO: 834 - DNA, 20 bp, Artificial Sequence
  Synthetic
ggcaacacccatattatctc

SEQ ID NO: 835 - DNA, 20 bp, Artificial Sequence
  Synthetic
gcttctcggtacacggagag

SEQ ID NO: 836 - DNA, 20 bp, Artificial Sequence
  Synthetic
gaccgttgtttcggtaacca

SEQ ID NO: 837 - DNA, 20 bp, Artificial Sequence
  Synthetic
gaagaaagcggcagggatgc

SEQ ID NO: 838 - DNA, 20 bp, Artificial Sequence
  Synthetic
gagagaagaaaggtgaggtc

SEQ ID NO: 839 - DNA, 20 bp, Artificial Sequence
  Synthetic
ggaccgttgtttcggtaacc

SEQ ID NO: 840 - DNA, 20 bp, Artificial Sequence
  Synthetic
gagggaatagacctggtgtt

SEQ ID NO: 841 - DNA, 20 bp, Artificial Sequence
  Synthetic
gtcagctgctcattactggt

SEQ ID NO: 842 - DNA, 20 bp, Artificial Sequence
  Synthetic
gccgacaatatctaacccaa

SEQ ID NO: 843 - DNA, 20 bp, Artificial Sequence
  Synthetic
gggaagatcggctccagttc

SEQ ID NO: 844 - DNA, 20 bp, Artificial Sequence
  Synthetic
gaaggaagagccctaaggtc

SEQ ID NO: 845 - DNA, 20 bp, Artificial Sequence
  Synthetic
gacaatctcccgcgtgaagg

SEQ ID NO: 846 - DNA, 20 bp, Artificial Sequence
  Synthetic
gaccggagctgatctgcata

SEQ ID NO: 847 - DNA, 20 bp, Artificial Sequence
  Synthetic
gggattacagcagcatcgcg

SEQ ID NO: 848 - DNA, 20 bp, Artificial Sequence
  Synthetic
gggttgtggaggtgtggagc

SEQ ID NO: 849 - DNA, 20 bp, Artificial Sequence
  Synthetic
gcgcagggataagaaagggc

SEQ ID NO: 850 - DNA, 20 bp, Artificial Sequence
  Synthetic
gccttggacttgaggaaccc

SEQ ID NO: 851 - DNA, 20 bp, Artificial Sequence
  Synthetic
gggtttacctgccggcaggt

SEQ ID NO: 852 - DNA, 20 bp, Artificial Sequence
  Synthetic
gatctgcatacgggctcccg

SEQ ID NO: 853 - DNA, 20 bp, Artificial Sequence
  Synthetic
ggagggcagaggcctgtgaa

SEQ ID NO: 854 - DNA, 20 bp, Artificial Sequence
  Synthetic
gtgagtcacttaaacagaag

SEQ ID NO: 855 - DNA, 20 bp, Artificial Sequence
  Synthetic
ggaactgaccctatacaaac

SEQ ID NO: 856 - DNA, 20 bp, Artificial Sequence
  Synthetic
ggacttggcctcagagacca

SEQ ID NO: 857 - DNA, 20 bp, Artificial Sequence
  Synthetic
gtccctgtcccaggactgac

SEQ ID NO: 858 - DNA, 20 bp, Artificial Sequence
  Synthetic
gaggccttgaccagtacctg

SEQ ID NO: 859 - DNA, 20 bp, Artificial Sequence
  Synthetic
ggcagtgagggcctctatga

SEQ ID NO: 860 - DNA, 20 bp, Artificial Sequence
  Synthetic
gcagagccaataggaacttg

SEQ ID NO: 861 - DNA, 20 bp, Artificial Sequence
  Synthetic
ggaggagccaccagaggttc

SEQ ID NO: 862 - DNA, 20 bp, Artificial Sequence
  Synthetic
gaggagccaccagaggttcc

SEQ ID NO: 863 - DNA, 20 bp, Artificial Sequence
  Synthetic
ggcataggaggttagacctg

SEQ ID NO: 864 - DNA, 20 bp, Artificial Sequence
  Synthetic
gggcttaacccacgaggtct

SEQ ID NO: 865 - DNA, 20 bp, Artificial Sequence
  Synthetic
ggacacacagaacgatcata

SEQ ID NO: 866 - DNA, 20 bp, Artificial Sequence
  Synthetic
gacttaacaaagcccatagc

SEQ ID NO: 867 - DNA, 20 bp, Artificial Sequence
  Synthetic
ggcctctagggacttgctag

SEQ ID NO: 868 - DNA, 20 bp, Artificial Sequence
  Synthetic
gctacctaggagctgttgcc

SEQ ID NO: 869 - DNA, 20 bp, Artificial Sequence
  Synthetic
gaggcctcacaggacagggt

SEQ ID NO: 870 - DNA, 20 bp, Artificial Sequence
  Synthetic
ggagttgtgatcatccctgg

SEQ ID NO: 871 - DNA, 20 bp, Artificial Sequence
  Synthetic
gagagaacagccttgtgtga

SEQ ID NO: 872 - DNA, 20 bp, Artificial Sequence
  Synthetic
gtccctcttgtccttcaccg

SEQ ID NO: 873 - DNA, 20 bp, Artificial Sequence
  Synthetic
gcgcatgcgcaacaggttgt

SEQ ID NO: 874 - DNA, 20 bp, Artificial Sequence
  Synthetic
gcggaacatttcaacggcac

SEQ ID NO: 875 - DNA, 20 bp, Artificial Sequence
  Synthetic
gaatttccagaactgactag

SEQ ID NO: 876 - DNA, 20 bp, Artificial Sequence
  Synthetic
gacaacgtgagagcctggaa

SEQ ID NO: 877 - DNA, 20 bp, Artificial Sequence
  Synthetic
gcttggagggatctcaggcc

SEQ ID NO: 878 - DNA, 20 bp, Artificial Sequence
  Synthetic
gctcagatgagacccagggt

SEQ ID NO: 879 - DNA, 20 bp, Artificial Sequence
  Synthetic
gcaatcccatggacacgctc

SEQ ID NO: 880 - DNA, 20 bp, Artificial Sequence
  Synthetic
gcctgagatccctccaagcc

SEQ ID NO: 881 - DNA, 20 bp, Artificial Sequence
  Synthetic
gagagcactaggagcaagct

SEQ ID NO: 882 - DNA, 20 bp, Artificial Sequence
  Synthetic
gttgaaatgttccgctagca

SEQ ID NO: 883 - DNA, 20 bp, Artificial Sequence
  Synthetic
gagtggtatcagttcccttt

SEQ ID NO: 884 - DNA, 20 bp, Artificial Sequence
  Synthetic
gatggccaattccagttcac

SEQ ID NO: 885 - DNA, 20 bp, Artificial Sequence
  Synthetic
ggacaccaaagctgcgcttc

SEQ ID NO: 886 - DNA, 20 bp, Artificial Sequence
  Synthetic
gtcatttctgaaacagggct

SEQ ID NO: 887 - DNA, 20 bp, Artificial Sequence
  Synthetic
ggattcacatcagctccttc

SEQ ID NO: 888 - DNA, 20 bp, Artificial Sequence
  Synthetic
gtggctcttgcatcagcctc

SEQ ID NO: 889 - DNA, 20 bp, Artificial Sequence
  Synthetic
gctaggttcctcccttgggc

SEQ ID NO: 890 - DNA, 20 bp, Artificial Sequence
  Synthetic
gttctggctgggaggcttct

SEQ ID NO: 891 - DNA, 20 bp, Artificial Sequence
  Synthetic
gtgcagattaaagtcatggc

SEQ ID NO: 892 - DNA, 20 bp, Artificial Sequence
  Synthetic
gcgagctccgtgtaacgttg

SEQ ID NO: 893 - DNA, 20 bp, Artificial Sequence
  Synthetic
gtagccctgggaggacttgt

SEQ ID NO: 894 - DNA, 20 bp, Artificial Sequence
  Synthetic
gccttcagcaggtgaggaag

SEQ ID NO: 895 - DNA, 20 bp, Artificial Sequence
  Synthetic
gcactgtctgtgtgtgttta

SEQ ID NO: 896 - DNA, 20 bp, Artificial Sequence
  Synthetic
gcttattccatgctattcta

SEQ ID NO: 897 - DNA, 20 bp, Artificial Sequence
  Synthetic
gcaccaggtcaccacttaca

SEQ ID NO: 898 - DNA, 20 bp, Artificial Sequence
  Synthetic
gaagctagtgatcattcaga

SEQ ID NO: 899 - DNA, 20 bp, Artificial Sequence
  Synthetic
gctcttactagcggagggcg

SEQ ID NO: 900 - DNA, 20 bp, Artificial Sequence
  Synthetic
gtggttctgacagacattcg

SEQ ID NO: 901 - DNA, 20 bp, Artificial Sequence
  Synthetic
gtggtctaccaggctgtgag

SEQ ID NO: 902 - DNA, 20 bp, Artificial Sequence
  Synthetic
gaggcaaagaccggagctct

SEQ ID NO: 903 - DNA, 20 bp, Artificial Sequence
  Synthetic
ggttgtgttagttgctgtgc

SEQ ID NO: 904 - DNA, 20 bp, Artificial Sequence
  Synthetic
gactgaaattgacctctact

SEQ ID NO: 905 - DNA, 20 bp, Artificial Sequence
  Synthetic
gaaggccagtgtggcacgtg

SEQ ID NO: 906 - DNA, 20 bp, Artificial Sequence
  Synthetic
gtttgtcctttgttgcaatc

SEQ ID NO: 907 - DNA, 20 bp, Artificial Sequence
  Synthetic
ggctggagcaacactttgga

SEQ ID NO: 908 - DNA, 20 bp, Artificial Sequence
  Synthetic
gagaaacactagaaccactg

SEQ ID NO: 909 - DNA, 20 bp, Artificial Sequence
  Synthetic
gcatgtggcattgctagctt

SEQ ID NO: 910 - DNA, 20 bp, Artificial Sequence
  Synthetic
gggcctgattcagctttcca

SEQ ID NO: 911 - DNA, 20 bp, Artificial Sequence
  Synthetic
gttgcagctacttggagacc

SEQ ID NO: 912 - DNA, 20 bp, Artificial Sequence
  Synthetic
ggatcagccactgctagtgc

SEQ ID NO: 913 - DNA, 20 bp, Artificial Sequence
  Synthetic
ggagctgctaggaacccttg

SEQ ID NO: 914 - DNA, 20 bp, Artificial Sequence
  Synthetic
gccctagagaggccactgac

SEQ ID NO: 915 - DNA, 20 bp, Artificial Sequence
  Synthetic
gggtcctaagaggttgggtt

SEQ ID NO: 916 - DNA, 20 bp, Artificial Sequence
  Synthetic
ggaaattaggaggaagaaag

SEQ ID NO: 917 - DNA, 20 bp, Artificial Sequence
  Synthetic
gttgagccacacactcaccc

SEQ ID NO: 918 - DNA, 20 bp, Artificial Sequence
  Synthetic
gcacagacctaactatttac

SEQ ID NO: 919 - DNA, 20 bp, Artificial Sequence
  Synthetic
gttgcgcatctgggcagcag

SEQ ID NO: 920 - DNA, 20 bp, Artificial Sequence
  Synthetic
gagaattgtggtgttctaca

SEQ ID NO: 921 - DNA, 20 bp, Artificial Sequence
  Synthetic
gagcagacatttatttatca

SEQ ID NO: 922 - DNA, 20 bp, Artificial Sequence
  Synthetic
gtagtctttggcgccagaac

SEQ ID NO: 923 - DNA, 20 bp, Artificial Sequence
  Synthetic
gctgacggcacagcttgtgc

SEQ ID NO: 924 - DNA, 20 bp, Artificial Sequence
  Synthetic
gagtagagctcagacgttgc

SEQ ID NO: 925 - DNA, 20 bp, Artificial Sequence
  Synthetic
gagtgctatctagatggtct

SEQ ID NO: 926 - DNA, 20 bp, Artificial Sequence
  Synthetic
ggatgacaagccaacgcgcg

SEQ ID NO: 927 - DNA, 20 bp, Artificial Sequence
  Synthetic
gaccaaggcctaacctggga

SEQ ID NO: 928 - DNA, 20 bp, Artificial Sequence
  Synthetic
gtcgcgttccaggtcccaaa

SEQ ID NO: 929 - DNA, 20 bp, Artificial Sequence
  Synthetic
gcgcgttggcttgtcatccg

SEQ ID NO: 930 - DNA, 20 bp, Artificial Sequence
  Synthetic
gggatggaagcattggaggg

SEQ ID NO: 931 - DNA, 20 bp, Artificial Sequence
  Synthetic
ggcgcacctgtggaatggag

SEQ ID NO: 932 - DNA, 20 bp, Artificial Sequence
  Synthetic
gaaactggccgctctgggag

SEQ ID NO: 933 - DNA, 20 bp, Artificial Sequence
  Synthetic
gctctgtggagagcattcgt

SEQ ID NO: 934 - DNA, 20 bp, Artificial Sequence
  Synthetic
gagctgtagcaatgagcttt

SEQ ID NO: 935 - DNA, 20 bp, Artificial Sequence
  Synthetic
ggaatgcctgaaccagtcct

SEQ ID NO: 936 - DNA, 20 bp, Artificial Sequence
  Synthetic
gcctgatgttgagccctcca

SEQ ID NO: 937 - DNA, 20 bp, Artificial Sequence
  Synthetic
gcgcatagtgttcaaataca

SEQ ID NO: 938 - DNA, 20 bp, Artificial Sequence
  Synthetic
gcacctgtggaatggagtgg

SEQ ID NO: 939 - DNA, 20 bp, Artificial Sequence
  Synthetic
gggatccagtgcaatacacc

SEQ ID NO: 940 - DNA, 20 bp, Artificial Sequence
  Synthetic
gtgagtagaagcggctttct

SEQ ID NO: 941 - DNA, 20 bp, Artificial Sequence
  Synthetic
ggcgctaagggaggacagag

SEQ ID NO: 942 - DNA, 20 bp, Artificial Sequence
  Synthetic
gaaagtttgtaaggcaccga

SEQ ID NO: 943 - DNA, 20 bp, Artificial Sequence
  Synthetic
gctgtgggctgggttgagag

SEQ ID NO: 944 - DNA, 20 bp, Artificial Sequence
  Synthetic
ggcaatcaagtttgcaacct

SEQ ID NO: 945 - DNA, 20 bp, Artificial Sequence
  Synthetic
gcttgcgcacaccacttcag

SEQ ID NO: 946 - DNA, 20 bp, Artificial Sequence
  Synthetic
gcatttgtgaacccgtaccc

SEQ ID NO: 947 - DNA, 20 bp, Artificial Sequence
  Synthetic
gcgagtaccaacgagggaaa

SEQ ID NO: 948 - DNA, 20 bp, Artificial Sequence
  Synthetic
gccatgaacacatgattgta

SEQ ID NO: 949 - DNA, 20 bp, Artificial Sequence
  Synthetic
gtataacacacttctggtat

SEQ ID NO: 950 - DNA, 20 bp, Artificial Sequence
  Synthetic
gctccgagcatggttagccg

SEQ ID NO: 951 - DNA, 20 bp, Artificial Sequence
  Synthetic
gtgaaagacacatggcaaag

SEQ ID NO: 952 - DNA, 20 bp, Artificial Sequence
  Synthetic
gtcagtgggacctgaccgtg

SEQ ID NO: 953 - DNA, 20 bp, Artificial Sequence
  Synthetic
gtccaattagtgttaatgtc

SEQ ID NO: 954 - DNA, 20 bp, Artificial Sequence
  Synthetic
gatcccttctgcactgagtt

SEQ ID NO: 955 - DNA, 20 bp, Artificial Sequence
  Synthetic
gcccatatccacgtggacta

SEQ ID NO: 956 - DNA, 20 bp, Artificial Sequence
  Synthetic
gaggcagggacaaaccaggt

SEQ ID NO: 957 - DNA, 20 bp, Artificial Sequence
  Synthetic
gactgggacgtgagagcaca

SEQ ID NO: 958 - DNA, 20 bp, Artificial Sequence
  Synthetic
gaaaggtaacaaatcaaaca

SEQ ID NO: 959 - DNA, 20 bp, Artificial Sequence
  Synthetic
gctacttagtctttgaacta

SEQ ID NO: 960 - DNA, 20 bp, Artificial Sequence
  Synthetic
gctcaacacctgggaactaa

SEQ ID NO: 961 - DNA, 20 bp, Artificial Sequence
  Synthetic
gtgggaagagagagagagaa

SEQ ID NO: 962 - DNA, 20 bp, Artificial Sequence
  Synthetic
gtggctcgttaaatcacaga

SEQ ID NO: 963 - DNA, 20 bp, Artificial Sequence
  Synthetic
gctctgttgattcttagaac

SEQ ID NO: 964 - DNA, 20 bp, Artificial Sequence
  Synthetic
gtcctttcttctctctttat

SEQ ID NO: 965 - DNA, 20 bp, Artificial Sequence
  Synthetic
ggtgggaagagagagagaga

SEQ ID NO: 966 - DNA, 20 bp, Artificial Sequence
  Synthetic
ggtagagccagccagagtgg

SEQ ID NO: 967 - DNA, 20 bp, Artificial Sequence
  Synthetic
ggcctctcccttctgttctt

SEQ ID NO: 968 - DNA, 20 bp, Artificial Sequence
  Synthetic
ggtcgtatcgtggatggctt

SEQ ID NO: 969 - DNA, 20 bp, Artificial Sequence
  Synthetic
gtctgcatccttccacgaga

SEQ ID NO: 970 - DNA, 20 bp, Artificial Sequence
  Synthetic
gcggagggtggtaatatggg

SEQ ID NO: 971 - DNA, 20 bp, Artificial Sequence
  Synthetic
gctgagagcttgattgatgg

SEQ ID NO: 972 - DNA, 20 bp, Artificial Sequence
  Synthetic
gaggttagtggtgcggaggg

SEQ ID NO: 973 - DNA, 20 bp, Artificial Sequence
  Synthetic
gaagctaggagaggatctga

SEQ ID NO: 974 - DNA, 20 bp, Artificial Sequence
  Synthetic
gccgaagagagcagggacct

SEQ ID NO: 975 - DNA, 20 bp, Artificial Sequence
  Synthetic
gagaaggaggagtgattgac

SEQ ID NO: 976 - DNA, 20 bp, Artificial Sequence
  Synthetic
gcatgagtacgcaactaatt

SEQ ID NO: 977 - DNA, 20 bp, Artificial Sequence
  Synthetic
gcatttagcaggaagaaacg

SEQ ID NO: 978 - DNA, 20 bp, Artificial Sequence
  Synthetic
ggttcctcgagtaggacgac

SEQ ID NO: 979 - DNA, 20 bp, Artificial Sequence
  Synthetic
gataagccacgccgagagtg

SEQ ID NO: 980 - DNA, 20 bp, Artificial Sequence
  Synthetic
ggcttcctccagttcttaac

SEQ ID NO: 981 - DNA, 20 bp, Artificial Sequence
  Synthetic
gagcaatttacaccttgagc

SEQ ID NO: 982 - DNA, 20 bp, Artificial Sequence
  Synthetic
ggcgagcccacgtttactac

SEQ ID NO: 983 - DNA, 20 bp, Artificial Sequence
  Synthetic
gagactcaagtttaaggcag

SEQ ID NO: 984 - DNA, 20 bp, Artificial Sequence
  Synthetic
ggaggtgccagtagtaaacg

SEQ ID NO: 985 - DNA, 20 bp, Artificial Sequence
  Synthetic
ggcttatcgcacgagggaga

SEQ ID NO: 986 - DNA, 20 bp, Artificial Sequence
  Synthetic
ggagacaggattaaggaggg

SEQ ID NO: 987 - DNA, 20 bp, Artificial Sequence
  Synthetic
ggcacttcctcctaaagtct

SEQ ID NO: 988 - DNA, 20 bp, Artificial Sequence
  Synthetic
ggccagggactcagtactgg

SEQ ID NO: 989 - DNA, 20 bp, Artificial Sequence
  Synthetic
gtgcttctgtggtgggaaga

SEQ ID NO: 990 - DNA, 20 bp, Artificial Sequence
  Synthetic
gcgtgtttgttctgtcactt

SEQ ID NO: 991 - DNA, 20 bp, Artificial Sequence
  Synthetic
gactggagcaaatggagtgt

SEQ ID NO: 992 - DNA, 20 bp, Artificial Sequence
  Synthetic
gtccagcacccaagggatcc

SEQ ID NO: 993 - DNA, 20 bp, Artificial Sequence
  Synthetic
gtctctctgtggagactcag

SEQ ID NO: 994 - DNA, 20 bp, Artificial Sequence
  Synthetic
gttagacagtgaggtaccaa

SEQ ID NO: 995 - DNA, 20 bp, Artificial Sequence
  Synthetic
gcaccgaagaagggagagat

SEQ ID NO: 996 - DNA, 20 bp, Artificial Sequence
  Synthetic
ggcaagcatggcaacctcca

SEQ ID NO: 997 - DNA, 20 bp, Artificial Sequence
  Synthetic
gaactgggtccagataggaa

SEQ ID NO: 998 - DNA, 20 bp, Artificial Sequence
  Synthetic
ggcatgatagcccaggagct

SEQ ID NO: 999 - DNA, 20 bp, Artificial Sequence
  Synthetic
gttggtctgctcacatgtta

SEQ ID NO: 1000 - DNA, 20 bp, Artificial Sequence
  Synthetic
gtgcaaagcccagtggaggc

SEQ ID NO: 1001 - DNA, 20 bp, Artificial Sequence
  Synthetic
gagcagaattccagcaggac

SEQ ID NO: 1002 - DNA, 20 bp, Artificial Sequence
  Synthetic
ggtcctgcctccaagtgtcc

SEQ ID NO: 1003 - DNA, 20 bp, Artificial Sequence
  Synthetic
ggacacttggaggcaggacc

SEQ ID NO: 1004 - DNA, 20 bp, Artificial Sequence
  Synthetic
gatactttgagcgtggcgtc

SEQ ID NO: 1005 - DNA, 20 bp, Artificial Sequence
  Synthetic
gagcctggtgaagggactgt

SEQ ID NO: 1006 - DNA, 20 bp, Artificial Sequence
  Synthetic
gggtgcagaaatatgtggag

SEQ ID NO: 1007 - DNA, 20 bp, Artificial Sequence
  Synthetic
gaagcaggtgcaacaaattg

SEQ ID NO: 1008 - DNA, 20 bp, Artificial Sequence
  Synthetic
gccttctgcctggtccacac

SEQ ID NO: 1009 - DNA, 20 bp, Artificial Sequence
  Synthetic
gggactggctgtttgggtct

SEQ ID NO: 1010 - DNA, 20 bp, Artificial Sequence
  Synthetic
ggctgtttgggtcttgggtc

SEQ ID NO: 1011 - DNA, 20 bp, Artificial Sequence
  Synthetic
gacccagaacaggcacctgg

SEQ ID NO: 1012 - DNA, 20 bp, Artificial Sequence
  Synthetic
gagagcaatgtgaagggcca

SEQ ID NO: 1013 - DNA, 20 bp, Artificial Sequence
  Synthetic
ggtgacttcgctctcagagt

SEQ ID NO: 1014 - DNA, 20 bp, Artificial Sequence
  Synthetic
gaaaggactcagagacaaga

SEQ ID NO: 1015 - DNA, 20 bp, Artificial Sequence
  Synthetic
gtgcctgttctgggtctacc

SEQ ID NO: 1016 - DNA, 20 bp, Artificial Sequence
  Synthetic
gcgagagggaagaaacaaga

SEQ ID NO: 1017 - DNA, 20 bp, Artificial Sequence
  Synthetic
ggtttgggagacacgcattg

SEQ ID NO: 1018 - DNA, 20 bp, Artificial Sequence
  Synthetic
gaggtgtggaagttcgtagc

SEQ ID NO: 1019 - DNA, 20 bp, Artificial Sequence
  Synthetic
ggctcaacacagggtcctcg

SEQ ID NO: 1020 - DNA, 20 bp, Artificial Sequence
  Synthetic
gttgttccaggaatgcacgc

SEQ ID NO: 1021 - DNA, 20 bp, Artificial Sequence
  Synthetic
gtcaggtagacattatttcc

SEQ ID NO: 1022 - DNA, 20 bp, Artificial Sequence
  Synthetic
gagtggtaaacttacccaca

SEQ ID NO: 1023 - DNA, 20 bp, Artificial Sequence
  Synthetic
gaacttaaggataggaagga

SEQ ID NO: 1024 - DNA, 20 bp, Artificial Sequence
  Synthetic
gcctttgggagctctctatt

SEQ ID NO: 1025 - DNA, 20 bp, Artificial Sequence
  Synthetic
gaagagactgaatgtcactt

SEQ ID NO: 1026 - DNA, 20 bp, Artificial Sequence
  Synthetic
gtggctgggaacctagacat

SEQ ID NO: 1027 - DNA, 20 bp, Artificial Sequence
  Synthetic
gttatgggtaagggtggcgg

SEQ ID NO: 1028 - DNA, 20 bp, Artificial Sequence
  Synthetic
gcgattcctcgagcaatctg

SEQ ID NO: 1029 - DNA, 20 bp, Artificial Sequence
  Synthetic
gtgttcctctttgtctggaa

SEQ ID NO: 1030 - DNA, 20 bp, Artificial Sequence
  Synthetic
gcctggcagcagccagtgaa

SEQ ID NO: 1031 - DNA, 20 bp, Artificial Sequence
  Synthetic
gtgaggatctacacagtggc

SEQ ID NO: 1032 - DNA, 20 bp, Artificial Sequence
  Synthetic
gaggcaagaagacaagcgcc

SEQ ID NO: 1033 - DNA, 20 bp, Artificial Sequence
  Synthetic
gggagcccggcgaaccaata

SEQ ID NO: 1034 - DNA, 20 bp, Artificial Sequence
  Synthetic
ggcctacaagatatctcagt

SEQ ID NO: 1035 - DNA, 20 bp, Artificial Sequence
  Synthetic
gtcactcagaataaagaagc

SEQ ID NO: 1036 - DNA, 20 bp, Artificial Sequence
  Synthetic
ggtacttgatgtgtgcgggc

SEQ ID NO: 1037 - DNA, 20 bp, Artificial Sequence
  Synthetic
gaacgagtcggaagggaact

SEQ ID NO: 1038 - DNA, 20 bp, Artificial Sequence
  Synthetic
gtagttgtagatgaggaatc

SEQ ID NO: 1039 - DNA, 20 bp, Artificial Sequence
  Synthetic
ggaaaggagaacgagtcgga

SEQ ID NO: 1040 - DNA, 20 bp, Artificial Sequence
  Synthetic
gcatagtcccatttgtacca

SEQ ID NO: 1041 - DNA, 20 bp, Artificial Sequence
  Synthetic
gagctgaagtgcttgtgtcc

SEQ ID NO: 1042 - DNA, 20 bp, Artificial Sequence
  Synthetic
gtcaactggacaattaatga

SEQ ID NO: 1043 - DNA, 20 bp, Artificial Sequence
  Synthetic
ggtgcaaggaagaagcacgg

SEQ ID NO: 1044 - DNA, 20 bp, Artificial Sequence
  Synthetic
ggcaccttggaggaatgggc

SEQ ID NO: 1045 - DNA, 20 bp, Artificial Sequence
  Synthetic
gctctggaatcataaagatt

SEQ ID NO: 1046 - DNA, 20 bp, Artificial Sequence
  Synthetic
gcctcttggctgttcgccag

SEQ ID NO: 1047 - DNA, 20 bp, Artificial Sequence
  Synthetic
ggctttccctctgctggttt

SEQ ID NO: 1048 - DNA, 20 bp, Artificial Sequence
  Synthetic
gagaaggaatacagaggagg

SEQ ID NO: 1049 - DNA, 20 bp, Artificial Sequence
  Synthetic
gcctcctttgtcttattgta

SEQ ID NO: 1050 - DNA, 20 bp, Artificial Sequence
  Synthetic
ggcggtggtacttgtgaggg

SEQ ID NO: 1051 - DNA, 20 bp, Artificial Sequence
  Synthetic
gagagtgatctaagtaaggg

SEQ ID NO: 1052 - DNA, 20 bp, Artificial Sequence
  Synthetic
gggaaaggagaaacagaagt

SEQ ID NO: 1053 - DNA, 20 bp, Artificial Sequence
  Synthetic
gtaagcatctaaccaaatca

SEQ ID NO: 1054 - DNA, 20 bp, Artificial Sequence
  Synthetic
gcgctaattgtttctcatat

SEQ ID NO: 1055 - DNA, 20 bp, Artificial Sequence
  Synthetic
gctgatacagaccactcagt

SEQ ID NO: 1056 - DNA, 20 bp, Artificial Sequence
  Synthetic
ggctgatgctagcgtttgcc

SEQ ID NO: 1057 - DNA, 20 bp, Artificial Sequence
  Synthetic
gaacagattaggtgcatgaa

SEQ ID NO: 1058 - DNA, 20 bp, Artificial Sequence
  Synthetic
gaggactttgcatacaggga

SEQ ID NO: 1059 - DNA, 20 bp, Artificial Sequence
  Synthetic
gtggactgtgcactgaaagg

SEQ ID NO: 1060 - DNA, 20 bp, Artificial Sequence
  Synthetic
gaagtgctgaggaaggagca

SEQ ID NO: 1061 - DNA, 20 bp, Artificial Sequence
  Synthetic
gagcttcgtttgagtgtttg

SEQ ID NO: 1062 - DNA, 20 bp, Artificial Sequence
  Synthetic
ggatctccggtagaacggaa

SEQ ID NO: 1063 - DNA, 20 bp, Artificial Sequence
  Synthetic
gagatgctgatacaagacta

SEQ ID NO: 1064 - DNA, 20 bp, Artificial Sequence
  Synthetic
gaactactgacctgacgcgc

SEQ ID NO: 1065 - DNA, 20 bp, Artificial Sequence
  Synthetic
ggtggaggagaaaggatctc

SEQ ID NO: 1066 - DNA, 20 bp, Artificial Sequence
  Synthetic
gacgtgacgaacttcctcca

SEQ ID NO: 1067 - DNA, 20 bp, Artificial Sequence
  Synthetic
ggttcctgggttcttagctc

SEQ ID NO: 1068 - DNA, 20 bp, Artificial Sequence
  Synthetic
gtagacattctaaagagaag

SEQ ID NO: 1069 - DNA, 20 bp, Artificial Sequence
  Synthetic
gtgtggcaaggcactgagca

SEQ ID NO: 1070 - DNA, 20 bp, Artificial Sequence
  Synthetic
gtgtagacattctaaagaga

SEQ ID NO: 1071 - DNA, 20 bp, Artificial Sequence
  Synthetic
gggagtcgagaaggtgactc

SEQ ID NO: 1072 - DNA, 20 bp, Artificial Sequence
  Synthetic
gctaaccaggtccaaggtcg

SEQ ID NO: 1073 - DNA, 20 bp, Artificial Sequence
  Synthetic
gcacactgcttccagaagca

SEQ ID NO: 1074 - DNA, 20 bp, Artificial Sequence
  Synthetic
gaggaacagaatgagggctg

SEQ ID NO: 1075 - DNA, 20 bp, Artificial Sequence
  Synthetic
gtctgttgcgaggaggaaac

SEQ ID NO: 1076 - DNA, 20 bp, Artificial Sequence
  Synthetic
gaagtacccattctgcccaa

SEQ ID NO: 1077 - DNA, 20 bp, Artificial Sequence
  Synthetic
ggtccaaggtcgaggtccca

SEQ ID NO: 1078 - DNA, 20 bp, Artificial Sequence
  Synthetic
gggctcctttgtctgcaggc

SEQ ID NO: 1079 - DNA, 20 bp, Artificial Sequence
  Synthetic
ggagtgtggtcctgtgacca

SEQ ID NO: 1080 - DNA, 20 bp, Artificial Sequence
  Synthetic
gagttggttcgaagagctgg

SEQ ID NO: 1081 - DNA, 20 bp, Artificial Sequence
  Synthetic
gatcctcgttggtaatggaa

SEQ ID NO: 1082 - DNA, 20 bp, Artificial Sequence
  Synthetic
gagttctgccctttcctctc

SEQ ID NO: 1083 - DNA, 20 bp, Artificial Sequence
  Synthetic
gccaagctagagaattcttt

SEQ ID NO: 1084 - DNA, 20 bp, Artificial Sequence
  Synthetic
ggcggtatgtccaccctttg

SEQ ID NO: 1085 - DNA, 20 bp, Artificial Sequence
  Synthetic
ggtagtggcttagagatgga

SEQ ID NO: 1086 - DNA, 20 bp, Artificial Sequence
  Synthetic
gtaaggtagcgggcgtctct

SEQ ID NO: 1087 - DNA, 20 bp, Artificial Sequence
  Synthetic
ggttccgtctgtaaggtagc

SEQ ID NO: 1088 - DNA, 20 bp, Artificial Sequence
  Synthetic
gaaggcctagcatggagggc

SEQ ID NO: 1089 - DNA, 20 bp, Artificial Sequence
  Synthetic
gcctgcctgcctgtcttcaa

SEQ ID NO: 1090 - DNA, 20 bp, Artificial Sequence
  Synthetic
gacgcccgctaccttacaga

SEQ ID NO: 1091 - DNA, 20 bp, Artificial Sequence
  Synthetic
gaaatgatactgacaggaac

SEQ ID NO: 1092 - DNA, 20 bp, Artificial Sequence
  Synthetic
gggatgtgaagggtggaagg

SEQ ID NO: 1093 - DNA, 20 bp, Artificial Sequence
  Synthetic
gcagtaatgaatagcgacaa

SEQ ID NO: 1094 - DNA, 20 bp, Artificial Sequence
  Synthetic
gcattcggaagacacaggct

SEQ ID NO: 1095 - DNA, 20 bp, Artificial Sequence
  Synthetic
gagagcattgtcagcatcct

SEQ ID NO: 1096 - DNA, 20 bp, Artificial Sequence
  Synthetic
gaagctcgtagctagcaaga

SEQ ID NO: 1097 - DNA, 20 bp, Artificial Sequence
  Synthetic
gtctttgaacctgtgattgg

SEQ ID NO: 1098 - DNA, 20 bp, Artificial Sequence
  Synthetic
ggtgagtacagtagctctgt

SEQ ID NO: 1099 - DNA, 20 bp, Artificial Sequence
  Synthetic
gagcttcctccttccaacct

SEQ ID NO: 1100 - DNA, 20 bp, Artificial Sequence
  Synthetic
gcactttaacctccaatcac

SEQ ID NO: 1101 - DNA, 20 bp, Artificial Sequence
  Synthetic
gtacatagatgagcaagaga

SEQ ID NO: 1102 - DNA, 20 bp, Artificial Sequence
  Synthetic
ggtcaattactcttgagtgt

SEQ ID NO: 1103 - DNA, 20 bp, Artificial Sequence
  Synthetic
gaaatgagcaagtgtcattg

SEQ ID NO: 1104 - DNA, 20 bp, Artificial Sequence
  Synthetic
gagcagactgctcctgctcc

SEQ ID NO: 1105 - DNA, 20 bp, Artificial Sequence
  Synthetic
gagtatgcggctcagagcaa

SEQ ID NO: 1106 - DNA, 20 bp, Artificial Sequence
  Synthetic
gaaaggcaggcctcagtgaa

SEQ ID NO: 1107 - DNA, 20 bp, Artificial Sequence
  Synthetic
ggtagccaggtcacaacaca

SEQ ID NO: 1108 - DNA, 20 bp, Artificial Sequence
  Synthetic
gtccctgaagtggcgctgat

SEQ ID NO: 1109 - DNA, 20 bp, Artificial Sequence
  Synthetic
gctgatgggctaggagctag

SEQ ID NO: 1110 - DNA, 20 bp, Artificial Sequence
  Synthetic
gtcattgtggtggacctgca

SEQ ID NO: 1111 - DNA, 20 bp, Artificial Sequence
  Synthetic
gagagacgtgggtgctcacc

SEQ ID NO: 1112 - DNA, 20 bp, Artificial Sequence
  Synthetic
gcaggtttgtttacctggga

SEQ ID NO: 1113 - DNA, 20 bp, Artificial Sequence
  Synthetic
gctgggtagcaacgtctgcc

SEQ ID NO: 1114 - DNA, 20 bp, Artificial Sequence
  Synthetic
gtgagcagaggatcgctctc

SEQ ID NO: 1115 - DNA, 20 bp, Artificial Sequence
  Synthetic
ggtcacggaacacggacaaa

SEQ ID NO: 1116 - DNA, 20 bp, Artificial Sequence
  Synthetic
gatcgaaggcgccagtagga

SEQ ID NO: 1117 - DNA, 20 bp, Artificial Sequence
  Synthetic
gtgacttagaggcttaaagg

SEQ ID NO: 1118 - DNA, 20 bp, Artificial Sequence
  Synthetic
ggaaagtcacaggagaaggc

SEQ ID NO: 1119 - DNA, 20 bp, Artificial Sequence
  Synthetic
gtgctagtggagagagatcg

SEQ ID NO: 1120 - DNA, 20 bp, Artificial Sequence
  Synthetic
gactttccaaggcggtgagt

SEQ ID NO: 1121 - DNA, 20 bp, Artificial Sequence
  Synthetic
ggtccctgaactggcctctc

SEQ ID NO: 1122 - DNA, 20 bp, Artificial Sequence
  Synthetic
ggagaaagtctcccaagcct

SEQ ID NO: 1123 - DNA, 20 bp, Artificial Sequence
  Synthetic
gaaatgttggcaggaagcta

SEQ ID NO: 1124 - DNA, 20 bp, Artificial Sequence
  Synthetic
gcctattgagcaaagaacct

SEQ ID NO: 1125 - DNA, 20 bp, Artificial Sequence
  Synthetic
gtggccagaccaaccaagaa

SEQ ID NO: 1126 - DNA, 20 bp, Artificial Sequence
  Synthetic
gctcagagacagcagagggc

SEQ ID NO: 1127 - DNA, 20 bp, Artificial Sequence
  Synthetic
gtcatttctccagctcttgg

SEQ ID NO: 1128 - DNA, 20 bp, Artificial Sequence
  Synthetic
ggctgcaaaggtctctggtg

SEQ ID NO: 1129 - DNA, 20 bp, Artificial Sequence
  Synthetic
gggttctgccacactgtgtc

SEQ ID NO: 1130 - DNA, 20 bp, Artificial Sequence
  Synthetic
gatctgtttcccaagagttg

SEQ ID NO: 1131 - DNA, 20 bp, Artificial Sequence
  Synthetic
gttgtgtttacaagacagcg

SEQ ID NO: 1132 - DNA, 20 bp, Artificial Sequence
  Synthetic
gaaccacggttcactagttc

SEQ ID NO: 1133 - DNA, 20 bp, Artificial Sequence
  Synthetic
gatgctatgctaccaccagg

SEQ ID NO: 1134 - DNA, 20 bp, Artificial Sequence
  Synthetic
gaaacgcaccgcggttaggg

SEQ ID NO: 1135 - DNA, 20 bp, Artificial Sequence
  Synthetic
gctcctaccttcagttcctg

SEQ ID NO: 1136 - DNA, 20 bp, Artificial Sequence
  Synthetic
gccttcagacatagcaaagg

SEQ ID NO: 1137 - DNA, 20 bp, Artificial Sequence
  Synthetic
gacatagcaaaggcggaaca

SEQ ID NO: 1138 - DNA, 20 bp, Artificial Sequence
  Synthetic
gtcctgctttgcgcgtgtcg

SEQ ID NO: 1139 - DNA, 20 bp, Artificial Sequence
  Synthetic
gacgccttcagacatagcaa

SEQ ID NO: 1140 - DNA, 20 bp, Artificial Sequence
  Synthetic
gttgctgaacctaacctcga

SEQ ID NO: 1141 - DNA, 20 bp, Artificial Sequence
  Synthetic
gtttagaccaagttggcact

SEQ ID NO: 1142 - DNA, 20 bp, Artificial Sequence
  Synthetic
gcagctaccagcttctcctt

SEQ ID NO: 1143 - DNA, 20 bp, Artificial Sequence
  Synthetic
ggtaggtggagttcaggact

SEQ ID NO: 1144 - DNA, 20 bp, Artificial Sequence
  Synthetic
gaagccttccctagcccagc

SEQ ID NO: 1145 - DNA, 20 bp, Artificial Sequence
  Synthetic
ggaagccttccctagcccag

SEQ ID NO: 1146 - DNA, 20 bp, Artificial Sequence
  Synthetic
gtagatagggaagcaggaga

SEQ ID NO: 1147 - DNA, 20 bp, Artificial Sequence
  Synthetic
gggctgccaggacatagctg

SEQ ID NO: 1148 - DNA, 20 bp, Artificial Sequence
  Synthetic
gatcctttctgttggttctg

SEQ ID NO: 1149 - DNA, 20 bp, Artificial Sequence
  Synthetic
gaaactggtcccgctgggct

SEQ ID NO: 1150 - DNA, 20 bp, Artificial Sequence
  Synthetic
gggttagtagaagatcaaga

SEQ ID NO: 1151 - DNA, 20 bp, Artificial Sequence
  Synthetic
gagctattcatatgaagtat

SEQ ID NO: 1152 - DNA, 20 bp, Artificial Sequence
  Synthetic
gaactgttcccgggagaccc

SEQ ID NO: 1153 - DNA, 20 bp, Artificial Sequence
  Synthetic
gactcctgggcattgactgc

SEQ ID NO: 1154 - DNA, 20 bp, Artificial Sequence
  Synthetic
gccaccaccgacagcctaag

SEQ ID NO: 1155 - DNA, 20 bp, Artificial Sequence
  Synthetic
ggattcctcgaagtcttatg

SEQ ID NO: 1156 - DNA, 20 bp, Artificial Sequence
  Synthetic
gcttctattggtcacggcgg

SEQ ID NO: 1157 - DNA, 20 bp, Artificial Sequence
  Synthetic
gcatgatgcagatctgtgaa

SEQ ID NO: 1158 - DNA, 20 bp, Artificial Sequence
  Synthetic
gatagaactttgcttgccat

SEQ ID NO: 1159 - DNA, 20 bp, Artificial Sequence
  Synthetic
ggaggaccacagtgtgactg

SEQ ID NO: 1160 - DNA, 20 bp, Artificial Sequence
  Synthetic
gagggtgttcctagaataga

SEQ ID NO: 1161 - DNA, 20 bp, Artificial Sequence
  Synthetic
gtgacgcacttcctattgcg

SEQ ID NO: 1162 - DNA, 20 bp, Artificial Sequence
  Synthetic
gtatgtccaatgacctatat

SEQ ID NO: 1163 - DNA, 20 bp, Artificial Sequence
  Synthetic
gctcctctgtgtacacacac

SEQ ID NO: 1164 - DNA, 20 bp, Artificial Sequence
  Synthetic
gattgcttatttgtgccatg

SEQ ID NO: 1165 - DNA, 20 bp, Artificial Sequence
  Synthetic
ggtggaacttggccctggtc

SEQ ID NO: 1166 - DNA, 20 bp, Artificial Sequence
  Synthetic
gccttccctgtatttggaga

SEQ ID NO: 1167 - DNA, 20 bp, Artificial Sequence
  Synthetic
ggcggtggctcaacacctga

SEQ ID NO: 1168 - DNA, 20 bp, Artificial Sequence
  Synthetic
gtgtacacagaggagcccga

SEQ ID NO: 1169 - DNA, 20 bp, Artificial Sequence
  Synthetic
gccgcgccatacggtttcca

SEQ ID NO: 1170 - DNA, 20 bp, Artificial Sequence
  Synthetic
gaagctcactctcagggtga

SEQ ID NO: 1171 - DNA, 20 bp, Artificial Sequence
  Synthetic
gaacctaagcgagcagcaga

SEQ ID NO: 1172 - DNA, 20 bp, Artificial Sequence
  Synthetic
gcagaaactgtgcctttcga

SEQ ID NO: 1173 - DNA, 20 bp, Artificial Sequence
  Synthetic
gggtcgtccaggtccatctc

SEQ ID NO: 1174 - DNA, 20 bp, Artificial Sequence
  Synthetic
ggacagagtggagaatgggt

SEQ ID NO: 1175 - DNA, 20 bp, Artificial Sequence
  Synthetic
gcacatggtgtttaaggcca

SEQ ID NO: 1176 - DNA, 20 bp, Artificial Sequence
  Synthetic
gtggtccaggcaggacactg

SEQ ID NO: 1177 - DNA, 20 bp, Artificial Sequence
  Synthetic
gacaatgaaaccattaaagg

SEQ ID NO: 1178 - DNA, 20 bp, Artificial Sequence
  Synthetic
gaggacaatgaaaccattaa

SEQ ID NO: 1179 - DNA, 20 bp, Artificial Sequence
  Synthetic
gacttaagaaggtgaaacct

SEQ ID NO: 1180 - DNA, 20 bp, Artificial Sequence
  Synthetic
gtacgtcgctctgcgccgtt

SEQ ID NO: 1181 - DNA, 20 bp, Artificial Sequence
  Synthetic
gaactgcttctagctctatc

SEQ ID NO: 1182 - DNA, 20 bp, Artificial Sequence
  Synthetic
gaagcttatctagtgggaga

SEQ ID NO: 1183 - DNA, 20 bp, Artificial Sequence
  Synthetic
gatcagataacagcctagac

SEQ ID NO: 1184 - DNA, 20 bp, Artificial Sequence
  Synthetic
gaatttccatggatcatttc

SEQ ID NO: 1185 - DNA, 20 bp, Artificial Sequence
  Synthetic
gcgtgggactgacgtttctc

SEQ ID NO: 1186 - DNA, 20 bp, Artificial Sequence
  Synthetic
gtttgcaacctagtcagcaa

SEQ ID NO: 1187 - DNA, 20 bp, Artificial Sequence
  Synthetic
gcatagcgtgtgagtgttaa

SEQ ID NO: 1188 - DNA, 20 bp, Artificial Sequence
  Synthetic
gactgagaaacacaaggcgt

SEQ ID NO: 1189 - DNA, 20 bp, Artificial Sequence
  Synthetic
gaaacatgctacaagaagaa

SEQ ID NO: 1190 - DNA, 20 bp, Artificial Sequence
  Synthetic
gcacgatccgagcctcactg

SEQ ID NO: 1191 - DNA, 20 bp, Artificial Sequence
  Synthetic
gctaagaaccgtgggaggaa

SEQ ID NO: 1192 - DNA, 20 bp, Artificial Sequence
  Synthetic
gctatggcacaggtggcatg

SEQ ID NO: 1193 - DNA, 20 bp, Artificial Sequence
  Synthetic
gagcagttgcggtagctttg

SEQ ID NO: 1194 - DNA, 20 bp, Artificial Sequence
  Synthetic
ggctcagatgactcctgcac

SEQ ID NO: 1195 - DNA, 20 bp, Artificial Sequence
  Synthetic
ggaactttgacgcgccgcga

SEQ ID NO: 1196 - DNA, 20 bp, Artificial Sequence
  Synthetic
ggtttgtgtgtagccagatt

SEQ ID NO: 1197 - DNA, 20 bp, Artificial Sequence
  Synthetic
gccggagctggttctttgct

SEQ ID NO: 1198 - DNA, 20 bp, Artificial Sequence
  Synthetic
gagcgtcgcaatggaccaat

SEQ ID NO: 1199 - DNA, 20 bp, Artificial Sequence
  Synthetic
gtcactggcctggaaggagg

SEQ ID NO: 1200 - DNA, 20 bp, Artificial Sequence
  Synthetic
gaaacatagatcaatgagct

SEQ ID NO: 1201 - DNA, 20 bp, Artificial Sequence
  Synthetic
gggcagagctcaagagccca

SEQ ID NO: 1202 - DNA, 20 bp, Artificial Sequence
  Synthetic
ggtcaggtcaatatagaagg

SEQ ID NO: 1203 - DNA, 20 bp, Artificial Sequence
  Synthetic
gaggagactgaagaaatcca

SEQ ID NO: 1204 - DNA, 20 bp, Artificial Sequence
  Synthetic
gagggaacccaggtcacaga

SEQ ID NO: 1205 - DNA, 20 bp, Artificial Sequence
  Synthetic
gaagaggctagtgtggtcca

SEQ ID NO: 1206 - DNA, 20 bp, Artificial Sequence
  Synthetic
gggagggacatggatgagaa

SEQ ID NO: 1207 - DNA, 20 bp, Artificial Sequence
  Synthetic
gtgtggcacacccaagtgag

SEQ ID NO: 1208 - DNA, 20 bp, Artificial Sequence
  Synthetic
ggaagtccctctaacacttt

SEQ ID NO: 1209 - DNA, 20 bp, Artificial Sequence
  Synthetic
gttcagaggcctccgaattg

SEQ ID NO: 1210 - DNA, 20 bp, Artificial Sequence
  Synthetic
gaccagcatcactgcatctg

SEQ ID NO: 1211 - DNA, 20 bp, Artificial Sequence
  Synthetic
gccattactagcatagggcg

SEQ ID NO: 1212 - DNA, 20 bp, Artificial Sequence
  Synthetic
gttgtctactagtctgtccc

SEQ ID NO: 1213 - DNA, 20 bp, Artificial Sequence
  Synthetic
gtgaatgtaggatgctggtg

SEQ ID NO: 1214 - DNA, 20 bp, Artificial Sequence
  Synthetic
gggcccatctcagatccagg

SEQ ID NO: 1215 - DNA, 20 bp, Artificial Sequence
  Synthetic
gtttaccaacagtatccttt

SEQ ID NO: 1216 - DNA, 20 bp, Artificial Sequence
  Synthetic
gttagctacagtactacaga

SEQ ID NO: 1217 - DNA, 20 bp, Artificial Sequence
  Synthetic
gaaagaaagattggaattca

SEQ ID NO: 1218 - DNA, 20 bp, Artificial Sequence
  Synthetic
ggaccagactctcttcagga

SEQ ID NO: 1219 - DNA, 20 bp, Artificial Sequence
  Synthetic
gcaagtgaagattaaagatg

SEQ ID NO: 1220 - DNA, 20 bp, Artificial Sequence
  Synthetic
gcaaatagaacttagcattg

SEQ ID NO: 1221 - DNA, 20 bp, Artificial Sequence
  Synthetic
gaacaaccatttgtgagttt

SEQ ID NO: 1222 - DNA, 20 bp, Artificial Sequence
  Synthetic
gaaggttacaaataggccag

SEQ ID NO: 1223 - DNA, 20 bp, Artificial Sequence
  Synthetic
gcagcctcttggctactaac

SEQ ID NO: 1224 - DNA, 20 bp, Artificial Sequence
  Synthetic
gacctcaatcccaaagtgtg

SEQ ID NO: 1225 - DNA, 20 bp, Artificial Sequence
  Synthetic
ggtgtcactgggaagcatgg

SEQ ID NO: 1226 - DNA, 20 bp, Artificial Sequence
  Synthetic
gttctgcttctctaaacacc

SEQ ID NO: 1227 - DNA, 20 bp, Artificial Sequence
  Synthetic
gggtggtgggattaagcaga

SEQ ID NO: 1228 - DNA, 20 bp, Artificial Sequence
  Synthetic
gaaggctaaactatgcagac

SEQ ID NO: 1229 - DNA, 20 bp, Artificial Sequence
  Synthetic
gaaacaatccttcaggccag

SEQ ID NO: 1230 - DNA, 20 bp, Artificial Sequence
  Synthetic
gtcactgggaagcatggagg

SEQ ID NO: 1231 - DNA, 20 bp, Artificial Sequence
  Synthetic
gatctggaagggtaatccca

SEQ ID NO: 1232 - DNA, 20 bp, Artificial Sequence
  Synthetic
gctctctgaagcttgacagg

SEQ ID NO: 1233 - DNA, 20 bp, Artificial Sequence
  Synthetic
ggccctaatctctcctagca

SEQ ID NO: 1234 - DNA, 20 bp, Artificial Sequence
  Synthetic
gccctaatctctcctagcag

SEQ ID NO: 1235 - DNA, 20 bp, Artificial Sequence
  Synthetic
ggcaacagaggtgaattgcc

SEQ ID NO: 1236 - DNA, 20 bp, Artificial Sequence
  Synthetic
gtagagagaagaaacctcct

SEQ ID NO: 1237 - DNA, 20 bp, Artificial Sequence
  Synthetic
gaaagaatggaaggcaggga

SEQ ID NO: 1238 - DNA, 20 bp, Artificial Sequence
  Synthetic
ggataagtctgtcagattca

SEQ ID NO: 1239 - DNA, 20 bp, Artificial Sequence
  Synthetic
gagatcatgatgagtgtatg

SEQ ID NO: 1240 - DNA, 20 bp, Artificial Sequence
  Synthetic
gcaggaagaggtggaaggca

SEQ ID NO: 1241 - DNA, 20 bp, Artificial Sequence
  Synthetic
gaatctgacagacttatccc

SEQ ID NO: 1242 - DNA, 20 bp, Artificial Sequence
  Synthetic
ggtctctttggttgggtaca

SEQ ID NO: 1243 - DNA, 20 bp, Artificial Sequence
  Synthetic
gaaggatgctgaaggccata

SEQ ID NO: 1244 - DNA, 20 bp, Artificial Sequence
  Synthetic
gtgtcccagaagttgaggga

SEQ ID NO: 1245 - DNA, 20 bp, Artificial Sequence
  Synthetic
ggaaagtacagctttgccag

SEQ ID NO: 1246 - DNA, 20 bp, Artificial Sequence
  Synthetic
gcagggaccatccctggagt

SEQ ID NO: 1247 - DNA, 20 bp, Artificial Sequence
  Synthetic
gtagagatgtggagatgcac

SEQ ID NO: 1248 - DNA, 20 bp, Artificial Sequence
  Synthetic
ggtttcctgggaggccctaa

SEQ ID NO: 1249 - DNA, 20 bp, Artificial Sequence
  Synthetic
gcctcagcagatatgtaggt

SEQ ID NO: 1250 - DNA, 20 bp, Artificial Sequence
  Synthetic
ggtttccgaggtttcctggg

SEQ ID NO: 1251 - DNA, 20 bp, Artificial Sequence
  Synthetic
ggaatttgggcagcctgaga

SEQ ID NO: 1252 - DNA, 20 bp, Artificial Sequence
  Synthetic
gtgagaatagaggaccacga

SEQ ID NO: 1253 - DNA, 20 bp, Artificial Sequence
  Synthetic
gggatgtgatgtgttggaga

SEQ ID NO: 1254 - DNA, 20 bp, Artificial Sequence
  Synthetic
ggtcttcaaagttgtgacct

SEQ ID NO: 1255 - DNA, 20 bp, Artificial Sequence
  Synthetic
gcacacaggacagaccttgc

SEQ ID NO: 1256 - DNA, 20 bp, Artificial Sequence
  Synthetic
gagacacattcatctccatg

SEQ ID NO: 1257 - DNA, 20 bp, Artificial Sequence
  Synthetic
gtgtcacactcctccctaaa

SEQ ID NO: 1258 - DNA, 20 bp, Artificial Sequence
  Synthetic
gagtagtgggttggccacca

SEQ ID NO: 1259 - DNA, 20 bp, Artificial Sequence
  Synthetic
gcgcctcccttgagactctg

SEQ ID NO: 1260 - DNA, 20 bp, Artificial Sequence
  Synthetic
gagcacagccactggaaagg

SEQ ID NO: 1261 - DNA, 20 bp, Artificial Sequence
  Synthetic
gtgtgcttctaagcccaggc

SEQ ID NO: 1262 - DNA, 20 bp, Artificial Sequence
  Synthetic
gagtcacattccaaggctat

SEQ ID NO: 1263 - DNA, 20 bp, Artificial Sequence
  Synthetic
gtcggagaagtgagagagtg

SEQ ID NO: 1264 - DNA, 20 bp, Artificial Sequence
  Synthetic
gggattaagtaccaccgact

SEQ ID NO: 1265 - DNA, 20 bp, Artificial Sequence
  Synthetic
gtaaccttaggactgctttc

SEQ ID NO: 1266 - DNA, 20 bp, Artificial Sequence
  Synthetic
ggtatcagaagccaggaata

SEQ ID NO: 1267 - DNA, 20 bp, Artificial Sequence
  Synthetic
gcaaataaaggcattgtctt

SEQ ID NO: 1268 - DNA, 20 bp, Artificial Sequence
  Synthetic
gattagaacacctgccaata

SEQ ID NO: 1269 - DNA, 20 bp, Artificial Sequence
  Synthetic
gggacagagtcacctcagtc

SEQ ID NO: 1270 - DNA, 20 bp, Artificial Sequence
  Synthetic
ggtgtggtctgctatatctc

SEQ ID NO: 1271 - DNA, 20 bp, Artificial Sequence
  Synthetic
ggcattgtctttggaaagaa

SEQ ID NO: 1272 - DNA, 20 bp, Artificial Sequence
  Synthetic
gtgaaggaagcgggaggtga

SEQ ID NO: 1273 - DNA, 20 bp, Artificial Sequence
  Synthetic
gagtaaactctgctgctggc

SEQ ID NO: 1274 - DNA, 20 bp, Artificial Sequence
  Synthetic
gttgatgacgtgtttctttc

SEQ ID NO: 1275 - DNA, 20 bp, Artificial Sequence
  Synthetic
gtcttccttcccagggttat

SEQ ID NO: 1276 - DNA, 20 bp, Artificial Sequence
  Synthetic
ggtcagtagaaccaggcgtg

SEQ ID NO: 1277 - DNA, 20 bp, Artificial Sequence
  Synthetic
ggaggtgatgggtacggagg

SEQ ID NO: 1278 - DNA, 20 bp, Artificial Sequence
  Synthetic
ggatcctatcccaataaccc

SEQ ID NO: 1279 - DNA, 20 bp, Artificial Sequence
  Synthetic
gctagaggaatatgaataca

SEQ ID NO: 1280 - DNA, 20 bp, Artificial Sequence
  Synthetic
gaagcgggaggtgatgggta

SEQ ID NO: 1281 - DNA, 20 bp, Artificial Sequence
  Synthetic
ggtaacacacttcacataga

SEQ ID NO: 1282 - DNA, 20 bp, Artificial Sequence
  Synthetic
gtggcagggctgcaaagaag

SEQ ID NO: 1283 - DNA, 20 bp, Artificial Sequence
  Synthetic
gacgcaatgtacgtcatata

SEQ ID NO: 1284 - DNA, 20 bp, Artificial Sequence
  Synthetic
gggtggcagggctgcaaaga

SEQ ID NO: 1285 - DNA, 20 bp, Artificial Sequence
  Synthetic
ggccatctacgtttgtgcgg

SEQ ID NO: 1286 - DNA, 20 bp, Artificial Sequence
  Synthetic
gtgcaattgtgtcgtggtaa

SEQ ID NO: 1287 - DNA, 20 bp, Artificial Sequence
  Synthetic
gagggctcatatgattacaa

SEQ ID NO: 1288 - DNA, 20 bp, Artificial Sequence
  Synthetic
gtcaccctccttcctgaggg

SEQ ID NO: 1289 - DNA, 20 bp, Artificial Sequence
  Synthetic
gaagtctatgcagcaaacca

SEQ ID NO: 1290 - DNA, 20 bp, Artificial Sequence
  Synthetic
gttgtctttgtgggtgtcga

SEQ ID NO: 1291 - DNA, 20 bp, Artificial Sequence
  Synthetic
gaactcgcgcgcgctaaaga

SEQ ID NO: 1292 - DNA, 20 bp, Artificial Sequence
  Synthetic
ggtaaatatgcaggcgacaa

SEQ ID NO: 1293 - DNA, 20 bp, Artificial Sequence
  Synthetic
ggatgcttgctgcgtttcta

SEQ ID NO: 1294 - DNA, 20 bp, Artificial Sequence
  Synthetic
ggacaatagatcaataccgt

SEQ ID NO: 1295 - DNA, 20 bp, Artificial Sequence
  Synthetic
gcaggaatttattgcaccac

SEQ ID NO: 1296 - DNA, 20 bp, Artificial Sequence
  Synthetic
gccactcggaattgctaact

SEQ ID NO: 1297 - DNA, 20 bp, Artificial Sequence
  Synthetic
gtctttctgaggccctggga

SEQ ID NO: 1298 - DNA, 20 bp, Artificial Sequence
  Synthetic
gcctctgtgggacacactgc

SEQ ID NO: 1299 - DNA, 20 bp, Artificial Sequence
  Synthetic
gagatagcgtctgctccatc

SEQ ID NO: 1300 - DNA, 20 bp, Artificial Sequence
  Synthetic
gcgaatttatgagcctttaa

SEQ ID NO: 1301 - DNA, 20 bp, Artificial Sequence
  Synthetic
gaaagaagtgggcttcggga

SEQ ID NO: 1302 - DNA, 20 bp, Artificial Sequence
  Synthetic
gtgttggagggtcaggtgag

SEQ ID NO: 1303 - DNA, 20 bp, Artificial Sequence
  Synthetic
ggcatatcccttcatctcat

SEQ ID NO: 1304 - DNA, 20 bp, Artificial Sequence
  Synthetic
ggcgcagttcactgagtcgg

SEQ ID NO: 1305 - DNA, 20 bp, Artificial Sequence
  Synthetic
ggcgggcgtaatcctcgttg

SEQ ID NO: 1306 - DNA, 20 bp, Artificial Sequence
  Synthetic
gtgaggaaactcagaacagg

SEQ ID NO: 1307 - DNA, 20 bp, Artificial Sequence
  Synthetic
gctgagaatggccaggccgt

SEQ ID NO: 1308 - DNA, 20 bp, Artificial Sequence
  Synthetic
ggtgtcagtcacctggaggg

SEQ ID NO: 1309 - DNA, 20 bp, Artificial Sequence
  Synthetic
ggccttcttccctccctaca

SEQ ID NO: 1310 - DNA, 20 bp, Artificial Sequence
  Synthetic
gcgaaagtgagggttcgcgg

SEQ ID NO: 1311 - DNA, 20 bp, Artificial Sequence
  Synthetic
gtgtacgtgcaagatctgtt

SEQ ID NO: 1312 - DNA, 20 bp, Artificial Sequence
  Synthetic
gagaagtgtgcagccctgcc

SEQ ID NO: 1313 - DNA, 20 bp, Artificial Sequence
  Synthetic
gaacgcactaaatttatctg

SEQ ID NO: 1314 - DNA, 20 bp, Artificial Sequence
  Synthetic
ggactcactgtatagcagag

SEQ ID NO: 1315 - DNA, 20 bp, Artificial Sequence
  Synthetic
ggagggtagctagccttcca

SEQ ID NO: 1316 - DNA, 20 bp, Artificial Sequence
  Synthetic
gtggaattcccagcccggtt

SEQ ID NO: 1317 - DNA, 20 bp, Artificial Sequence
  Synthetic
ggaagaactaagttcacaca

SEQ ID NO: 1318 - DNA, 20 bp, Artificial Sequence
  Synthetic
gacaggtttgcgctagctac

SEQ ID NO: 1319 - DNA, 20 bp, Artificial Sequence
  Synthetic
gtggcaaagagcgaaagtga

SEQ ID NO: 1320 - DNA, 20 bp, Artificial Sequence
  Synthetic
gttaacagaagggaataaag

SEQ ID NO: 1321 - DNA, 20 bp, Artificial Sequence
  Synthetic
gatcagacaattctgtgctg

SEQ ID NO: 1322 - DNA, 20 bp, Artificial Sequence
  Synthetic
ggatgcttcaagacaaagga

SEQ ID NO: 1323 - DNA, 20 bp, Artificial Sequence
  Synthetic
ggagataggtgcactgtgtc

SEQ ID NO: 1324 - DNA, 20 bp, Artificial Sequence
  Synthetic
gaaaggcaaagtaagggtgg

SEQ ID NO: 1325 - DNA, 20 bp, Artificial Sequence
  Synthetic
gcgaccaagtacatgtaccc

SEQ ID NO: 1326 - DNA, 20 bp, Artificial Sequence
  Synthetic
gatctagctgagaaccacaa

SEQ ID NO: 1327 - DNA, 20 bp, Artificial Sequence
  Synthetic
ggactccagcagcagggtca

SEQ ID NO: 1328 - DNA, 20 bp, Artificial Sequence
  Synthetic
gtaactattgagatgagtgg

SEQ ID NO: 1329 - DNA, 20 bp, Artificial Sequence
  Synthetic
ggattggccaccagtggcct

SEQ ID NO: 1330 - DNA, 20 bp, Artificial Sequence
  Synthetic
gttcaggaaggacagccgtt

SEQ ID NO: 1331 - DNA, 20 bp, Artificial Sequence
  Synthetic
gcacagcagtggccagacac

SEQ ID NO: 1332 - DNA, 20 bp, Artificial Sequence
  Synthetic
gtcaatccaggtgaacaaat

SEQ ID NO: 1333 - DNA, 20 bp, Artificial Sequence
  Synthetic
ggagtcaggaatgtcaggtc

SEQ ID NO: 1334 - DNA, 20 bp, Artificial Sequence
  Synthetic
gcaattgcttggtgacctgt

SEQ ID NO: 1335 - DNA, 20 bp, Artificial Sequence
  Synthetic
gccgtgagactcctgagtgg

SEQ ID NO: 1336 - DNA, 20 bp, Artificial Sequence
  Synthetic
gagaagcgggtggactatca

SEQ ID NO: 1337 - DNA, 20 bp, Artificial Sequence
  Synthetic
gacatgttgacctggagagg

SEQ ID NO: 1338 - DNA, 20 bp, Artificial Sequence
  Synthetic
gaactcagacagctagaggc

SEQ ID NO: 1339 - DNA, 20 bp, Artificial Sequence
  Synthetic
gacaaaggtagactatatgt

SEQ ID NO: 1340 - DNA, 20 bp, Artificial Sequence
  Synthetic
ggtgtgatatggttgtatac

SEQ ID NO: 1341 - DNA, 20 bp, Artificial Sequence
  Synthetic
ggcttctagagctgaagtgg

SEQ ID NO: 1342 - DNA, 20 bp, Artificial Sequence
  Synthetic
gtgtgctcaggatgagccat

SEQ ID NO: 1343 - DNA, 20 bp, Artificial Sequence
  Synthetic
gctgagagcacctgagagtg

SEQ ID NO: 1344 - DNA, 20 bp, Artificial Sequence
  Synthetic
gatcactgagagtctagggt

SEQ ID NO: 1345 - DNA, 20 bp, Artificial Sequence
  Synthetic
gagtgtattgtggatatgcc

SEQ ID NO: 1346 - DNA, 20 bp, Artificial Sequence
  Synthetic
gcatctgaagagacccaggc

SEQ ID NO: 1347 - DNA, 20 bp, Artificial Sequence
  Synthetic
gcaggtgagcacttcagcca

SEQ ID NO: 1348 - DNA, 20 bp, Artificial Sequence
  Synthetic
gtctcctcagcagccaagga

SEQ ID NO: 1349 - DNA, 20 bp, Artificial Sequence
  Synthetic
gtagacccatggtcgctctc

SEQ ID NO: 1350 - DNA, 20 bp, Artificial Sequence
  Synthetic
gtacaacaaatggtctagtg

SEQ ID NO: 1351 - DNA, 20 bp, Artificial Sequence
  Synthetic
gtcggatggccggattgcct

SEQ ID NO: 1352 - DNA, 20 bp, Artificial Sequence
  Synthetic
gggacaattattgcaggtga

SEQ ID NO: 1353 - DNA, 20 bp, Artificial Sequence
  Synthetic
gacgcctaaccctgaaccgc

SEQ ID NO: 1354 - DNA, 20 bp, Artificial Sequence
  Synthetic
gttgaacctaccttcagggt

SEQ ID NO: 1355 - DNA, 20 bp, Artificial Sequence
  Synthetic
gaggaggaggtgggaagctg

SEQ ID NO: 1356 - DNA, 20 bp, Artificial Sequence
  Synthetic
gtggtgtgtggtagtagtgg

SEQ ID NO: 1357 - DNA, 20 bp, Artificial Sequence
  Synthetic
gcttcccacctcctcctcca

SEQ ID NO: 1358 - DNA, 20 bp, Artificial Sequence
  Synthetic
gcaataattgtcccagtggt

SEQ ID NO: 1359 - DNA, 20 bp, Artificial Sequence
  Synthetic
gattctgaggttccctcctt

SEQ ID NO: 1360 - DNA, 20 bp, Artificial Sequence
  Synthetic
gtaggaggttgttacaggcc

SEQ ID NO: 1361 - DNA, 20 bp, Artificial Sequence
  Synthetic
gccttcaaagtcgtttgcat

SEQ ID NO: 1362 - DNA, 20 bp, Artificial Sequence
  Synthetic
gtggatcaagctacactctg

SEQ ID NO: 1363 - DNA, 20 bp, Artificial Sequence
  Synthetic
gcatccacttcccaggctac

SEQ ID NO: 1364 - DNA, 20 bp, Artificial Sequence
  Synthetic
gtcagccactttgcacctga

SEQ ID NO: 1365 - DNA, 20 bp, Artificial Sequence
  Synthetic
ggagccttatgtcctgttgc

SEQ ID NO: 1366 - DNA, 20 bp, Artificial Sequence
  Synthetic
gagatgtaaatcgttagact

SEQ ID NO: 1367 - DNA, 20 bp, Artificial Sequence
  Synthetic
gccttcaggacaggcttgat

SEQ ID NO: 1368 - DNA, 20 bp, Artificial Sequence
  Synthetic
ggatggactcagcgcagtga

SEQ ID NO: 1369 - DNA, 20 bp, Artificial Sequence
  Synthetic
gctggctttctgtgttcttc

SEQ ID NO: 1370 - DNA, 20 bp, Artificial Sequence
  Synthetic
gtgtctctgtatgtagtgtg

SEQ ID NO: 1371 - DNA, 20 bp, Artificial Sequence
  Synthetic
gctgaggcacagttgatgga

SEQ ID NO: 1372 - DNA, 20 bp, Artificial Sequence
  Synthetic
gttgatggaaggcctgaagc

SEQ ID NO: 1373 - DNA, 20 bp, Artificial Sequence
  Synthetic
ggctgcaagtcttgccttcg

SEQ ID NO: 1374 - DNA, 20 bp, Artificial Sequence
  Synthetic
ggagaagcctccttcctcca

SEQ ID NO: 1375 - DNA, 20 bp, Artificial Sequence
  Synthetic
gctcccaaacctatccttgg

SEQ ID NO: 1376 - DNA, 20 bp, Artificial Sequence
  Synthetic
gtggctcttccattcatgaa

SEQ ID NO: 1377 - DNA, 20 bp, Artificial Sequence
  Synthetic
gggcttaggtgagatgagga

SEQ ID NO: 1378 - DNA, 20 bp, Artificial Sequence
  Synthetic
ggtaagcaggcagacaggaa

SEQ ID NO: 1379 - DNA, 20 bp, Artificial Sequence
  Synthetic
gctggagggaatctgctgtc

SEQ ID NO: 1380 - DNA, 20 bp, Artificial Sequence
  Synthetic
gtaacgatgttcaaggtgct

SEQ ID NO: 1381 - DNA, 20 bp, Artificial Sequence
  Synthetic
gatgtgctttgaggcagggc

SEQ ID NO: 1382 - DNA, 20 bp, Artificial Sequence
  Synthetic
gtgatcctggagctcagatt

SEQ ID NO: 1383 - DNA, 20 bp, Artificial Sequence
  Synthetic
gacaggtccaactttctttc

SEQ ID NO: 1384 - DNA, 20 bp, Artificial Sequence
  Synthetic
gcaacagatgcttgcataca

SEQ ID NO: 1385 - DNA, 20 bp, Artificial Sequence
  Synthetic
gaacagagacaggcaaatcc

SEQ ID NO: 1386 - DNA, 20 bp, Artificial Sequence
  Synthetic
gaatctagtttgatggctcc

SEQ ID NO: 1387 - DNA, 20 bp, Artificial Sequence
  Synthetic
ggagatcctctttgtctggt

SEQ ID NO: 1388 - DNA, 20 bp, Artificial Sequence
  Synthetic
gattccctccagcagcctca

SEQ ID NO: 1389 - DNA, 20 bp, Artificial Sequence
  Synthetic
gtttccagtatcagggtcat

SEQ ID NO: 1390 - DNA, 20 bp, Artificial Sequence
  Synthetic
gcaaggaaccaagtccgctt

SEQ ID NO: 1391 - DNA, 20 bp, Artificial Sequence
  Synthetic
ggcaaggaaccaagtccgct

SEQ ID NO: 1392 - DNA, 20 bp, Artificial Sequence
  Synthetic
ggccagtctttcagcacttc

SEQ ID NO: 1393 - DNA, 20 bp, Artificial Sequence
  Synthetic
gctccctgctgagacatgta

SEQ ID NO: 1394 - DNA, 20 bp, Artificial Sequence
  Synthetic
gagattggtgaatttcaaag

SEQ ID NO: 1395 - DNA, 20 bp, Artificial Sequence
  Synthetic
ggagaacagcattgtcttag

SEQ ID NO: 1396 - DNA, 20 bp, Artificial Sequence
  Synthetic
gcagctccagattccagaga

SEQ ID NO: 1397 - DNA, 20 bp, Artificial Sequence
  Synthetic
gcaggaggtcagtccctctc

SEQ ID NO: 1398 - DNA, 20 bp, Artificial Sequence
  Synthetic
gaatcttctggttcctcttc

SEQ ID NO: 1399 - DNA, 20 bp, Artificial Sequence
  Synthetic
gactgggtgggagaaatctg

SEQ ID NO: 1400 - DNA, 20 bp, Artificial Sequence
  Synthetic
ggtgtgtctggaggttgcgg

SEQ ID NO: 1401 - DNA, 20 bp, Artificial Sequence
  Synthetic
ggtaagctctaggagcttgc

SEQ ID NO: 1402 - DNA, 20 bp, Artificial Sequence
  Synthetic
ggttctcctacctggtggct

SEQ ID NO: 1403 - DNA, 20 bp, Artificial Sequence
  Synthetic
gtccatctttgaaacagaag

SEQ ID NO: 1404 - DNA, 20 bp, Artificial Sequence
  Synthetic
gcctgtaatgattatggact

SEQ ID NO: 1405 - DNA, 20 bp, Artificial Sequence
  Synthetic
gctcccttgggagtagagtt

SEQ ID NO: 1406 - DNA, 20 bp, Artificial Sequence
  Synthetic
gagttactgaaccggcaccc

SEQ ID NO: 1407 - DNA, 20 bp, Artificial Sequence
  Synthetic
gtcgaatggtttgtctccaa

SEQ ID NO: 1408 - DNA, 20 bp, Artificial Sequence
  Synthetic
ggaaccttgtagtgcaagat

SEQ ID NO: 1409 - DNA, 20 bp, Artificial Sequence
  Synthetic
gatgagcataggacccaacc

SEQ ID NO: 1410 - DNA, 20 bp, Artificial Sequence
  Synthetic
gactgaacggatggaggtct

SEQ ID NO: 1411 - DNA, 20 bp, Artificial Sequence
  Synthetic
gtgtgtgttctatgcttgtg

SEQ ID NO: 1412 - DNA, 20 bp, Artificial Sequence
  Synthetic
gcacacacctcagacacaca

SEQ ID NO: 1413 - DNA, 20 bp, Artificial Sequence
  Synthetic
ggaagaggtcgttatgcagg

SEQ ID NO: 1414 - DNA, 20 bp, Artificial Sequence
  Synthetic
gggaaatgatggacgctgcc

SEQ ID NO: 1415 - DNA, 20 bp, Artificial Sequence
  Synthetic
gtagccaatcttgcactaca

SEQ ID NO: 1416 - DNA, 20 bp, Artificial Sequence
  Synthetic
gggatcctggtgggagagaa

SEQ ID NO: 1417 - DNA, 20 bp, Artificial Sequence
  Synthetic
ggcgccctgcctctaactct

SEQ ID NO: 1418 - DNA, 20 bp, Artificial Sequence
  Synthetic
gataacagatattagctgcc

SEQ ID NO: 1419 - DNA, 20 bp, Artificial Sequence
  Synthetic
gaaccttccgaggattgcgt

SEQ ID NO: 1420 - DNA, 20 bp, Artificial Sequence
  Synthetic
gtactggtccaagctggaag

SEQ ID NO: 1421 - DNA, 20 bp, Artificial Sequence
  Synthetic
gcctcttggctaacagagac

SEQ ID NO: 1422 - DNA, 20 bp, Artificial Sequence
  Synthetic
gacactggcagagagcaggt

SEQ ID NO: 1423 - DNA, 20 bp, Artificial Sequence
  Synthetic
gtggtcctgagatggaagcc

SEQ ID NO: 1424 - DNA, 20 bp, Artificial Sequence
  Synthetic
gaggaggcagtggtacacat

SEQ ID NO: 1425 - DNA, 20 bp, Artificial Sequence
  Synthetic
gagcgccaatggttgcttgg

SEQ ID NO: 1426 - DNA, 20 bp, Artificial Sequence
  Synthetic
gcaattacatgtgtaccatc

SEQ ID NO: 1427 - DNA, 20 bp, Artificial Sequence
  Synthetic
ggtaggtgaatggttgcatg

SEQ ID NO: 1428 - DNA, 20 bp, Artificial Sequence
  Synthetic
gttctcgagaaggtaactaa

SEQ ID NO: 1429 - DNA, 20 bp, Artificial Sequence
  Synthetic
ggtggtggataatactagga

SEQ ID NO: 1430 - DNA, 20 bp, Artificial Sequence
  Synthetic
gtgtatgaaccagtcagatg

SEQ ID NO: 1431 - DNA, 20 bp, Artificial Sequence
  Synthetic
gcagagagtagagccgggag

SEQ ID NO: 1432 - DNA, 20 bp, Artificial Sequence
  Synthetic
gatagggagccctaagacag

SEQ ID NO: 1433 - DNA, 20 bp, Artificial Sequence
  Synthetic
gaacttaaacgcacccaccc

SEQ ID NO: 1434 - DNA, 20 bp, Artificial Sequence
  Synthetic
ggcaaagaccaggctctcta

SEQ ID NO: 1435 - DNA, 20 bp, Artificial Sequence
  Synthetic
gatcatgtggataacgggct

SEQ ID NO: 1436 - DNA, 20 bp, Artificial Sequence
  Synthetic
gaccacaaatgaggaaacta

SEQ ID NO: 1437 - DNA, 20 bp, Artificial Sequence
  Synthetic
gtgggaaagtggttccctgg

SEQ ID NO: 1438 - DNA, 20 bp, Artificial Sequence
  Synthetic
gaggagttgatagttgttcc

SEQ ID NO: 1439 - DNA, 20 bp, Artificial Sequence
  Synthetic
gttacaatagactttgaggc

SEQ ID NO: 1440 - DNA, 20 bp, Artificial Sequence
  Synthetic
gatgtgcactggagtgaaac

SEQ ID NO: 1441 - DNA, 20 bp, Artificial Sequence
  Synthetic
gggtgaaagttaacgtaaac

SEQ ID NO: 1442 - DNA, 20 bp, Artificial Sequence
  Synthetic
gggaattgagggtactccgc

SEQ ID NO: 1443 - DNA, 20 bp, Artificial Sequence
  Synthetic
gaatggctgaggccaagggt

SEQ ID NO: 1444 - DNA, 20 bp, Artificial Sequence
  Synthetic
gccaagggtgggaaggaaag

SEQ ID NO: 1445 - DNA, 20 bp, Artificial Sequence
  Synthetic
gctttaacaactcagtggga

SEQ ID NO: 1446 - DNA, 20 bp, Artificial Sequence
  Synthetic
gaagggaccagggaaggaag

SEQ ID NO: 1447 - DNA, 20 bp, Artificial Sequence
  Synthetic
gaaggagccaacggaagtcc

SEQ ID NO: 1448 - DNA, 20 bp, Artificial Sequence
  Synthetic
gtgcagacttcatctaggaa

SEQ ID NO: 1449 - DNA, 20 bp, Artificial Sequence
  Synthetic
gcggtttcttgctctgggac

SEQ ID NO: 1450 - DNA, 20 bp, Artificial Sequence
  Synthetic
gctctctgtttctactaagt

SEQ ID NO: 1451 - DNA, 20 bp, Artificial Sequence
  Synthetic
gggcggagagtgggactttc

SEQ ID NO: 1452 - DNA, 20 bp, Artificial Sequence
  Synthetic
gtctagactcagaggctcac

SEQ ID NO: 1453 - DNA, 20 bp, Artificial Sequence
  Synthetic
gacaggttaattcagagtca

SEQ ID NO: 1454 - DNA, 20 bp, Artificial Sequence
  Synthetic
gagcacatgcagattataca

SEQ ID NO: 1455 - DNA, 20 bp, Artificial Sequence
  Synthetic
gaggacctagggcggagagt

SEQ ID NO: 1456 - DNA, 20 bp, Artificial Sequence
  Synthetic
gctccgaggtagttgagagc

SEQ ID NO: 1457 - DNA, 20 bp, Artificial Sequence
  Synthetic
gcagaagctaacatcaggaa

SEQ ID NO: 1458 - DNA, 20 bp, Artificial Sequence
  Synthetic
gagtgtgcatactcgcgacc

SEQ ID NO: 1459 - DNA, 20 bp, Artificial Sequence
  Synthetic
gactgtgtcaccctccagct

SEQ ID NO: 1460 - DNA, 20 bp, Artificial Sequence
  Synthetic
gaaaggcaaggagggcacag

SEQ ID NO: 1461 - DNA, 20 bp, Artificial Sequence
  Synthetic
ggcattcacgtgaagaatta

SEQ ID NO: 1462 - DNA, 20 bp, Artificial Sequence
  Synthetic
gcttggacccacgttcctcc

SEQ ID NO: 1463 - DNA, 20 bp, Artificial Sequence
  Synthetic
gcattaaaggtgatagaggg

SEQ ID NO: 1464 - DNA, 20 bp, Artificial Sequence
  Synthetic
ggaaaggcaaggagggcaca

SEQ ID NO: 1465 - DNA, 20 bp, Artificial Sequence
  Synthetic
gggagcacatatccaacagg

SEQ ID NO: 1466 - DNA, 20 bp, Artificial Sequence
  Synthetic
gtcagggatgaaagattcgc

SEQ ID NO: 1467 - DNA, 20 bp, Artificial Sequence
  Synthetic
gcctcctgactggagagtct

SEQ ID NO: 1468 - DNA, 20 bp, Artificial Sequence
  Synthetic
gccctgctgtgaaatctttc

SEQ ID NO: 1469 - DNA, 20 bp, Artificial Sequence
  Synthetic
ggaataaaggccatcctgga

SEQ ID NO: 1470 - DNA, 20 bp, Artificial Sequence
  Synthetic
gggtgtcatctgaagtgggt

SEQ ID NO: 1471 - DNA, 20 bp, Artificial Sequence
  Synthetic
ggtgtcatctgaagtgggta

SEQ ID NO: 1472 - DNA, 20 bp, Artificial Sequence
  Synthetic
gcaagtgaagcaggaatgag

SEQ ID NO: 1473 - DNA, 20 bp, Artificial Sequence
  Synthetic
gacaaagcatgtgttccagt

SEQ ID NO: 1474 - DNA, 20 bp, Artificial Sequence
  Synthetic
gaaatctttctggtgatgcc

SEQ ID NO: 1475 - DNA, 20 bp, Artificial Sequence
  Synthetic
gtctgtatctactctctccc

SEQ ID NO: 1476 - DNA, 20 bp, Artificial Sequence
  Synthetic
gcaatcagtgagctggaaag

SEQ ID NO: 1477 - DNA, 20 bp, Artificial Sequence
  Synthetic
gatgtctcctcatgtattgg

SEQ ID NO: 1478 - DNA, 20 bp, Artificial Sequence
  Synthetic
gagtgatgagaggtgtcctt

SEQ ID NO: 1479 - DNA, 20 bp, Artificial Sequence
  Synthetic
ggtgctataaggccacacat

SEQ ID NO: 1480 - DNA, 20 bp, Artificial Sequence
  Synthetic
gattgttgccgcggagaagc

SEQ ID NO: 1481 - DNA, 20 bp, Artificial Sequence
  Synthetic
gcaagataattgcatttccc

SEQ ID NO: 1482 - DNA, 20 bp, Artificial Sequence
  Synthetic
ggatcagcaccatggccagg

SEQ ID NO: 1483 - DNA, 20 bp, Artificial Sequence
  Synthetic
ggtgctttctgcccagcctg

SEQ ID NO: 1484 - DNA, 20 bp, Artificial Sequence
  Synthetic
gaagtgaacgcttaagcggt

SEQ ID NO: 1485 - DNA, 20 bp, Artificial Sequence
  Synthetic
gatcaccagtctgtggaact

SEQ ID NO: 1486 - DNA, 20 bp, Artificial Sequence
  Synthetic
gctccagccttggcacacag

SEQ ID NO: 1487 - DNA, 20 bp, Artificial Sequence
  Synthetic
ggactgactgagtccatatc

SEQ ID NO: 1488 - DNA, 20 bp, Artificial Sequence
  Synthetic
ggtgacctgagggcaatttg

SEQ ID NO: 1489 - DNA, 20 bp, Artificial Sequence
  Synthetic
gtggcagcaagactgccagt

SEQ ID NO: 1490 - DNA, 20 bp, Artificial Sequence
  Synthetic
gccagaatctggacggtgag

SEQ ID NO: 1491 - DNA, 20 bp, Artificial Sequence
  Synthetic
gaggctgctgagtttatgcc

SEQ ID NO: 1492 - DNA, 20 bp, Artificial Sequence
  Synthetic
ggagcactttccctccctga

SEQ ID NO: 1493 - DNA, 20 bp, Artificial Sequence
  Synthetic
gcaacaatgtagtaacactt

SEQ ID NO: 1494 - DNA, 20 bp, Artificial Sequence
  Synthetic
gaatctggacggtgagaggc

SEQ ID NO: 1495 - DNA, 20 bp, Artificial Sequence
  Synthetic
gcaatcagaaatgctgatgg

SEQ ID NO: 1496 - DNA, 20 bp, Artificial Sequence
  Synthetic
gatcaacacattatctggga

SEQ ID NO: 1497 - DNA, 20 bp, Artificial Sequence
  Synthetic
gggagccaggaaatgagtaa

SEQ ID NO: 1498 - DNA, 20 bp, Artificial Sequence
  Synthetic
gttaagaattggagaggcca

SEQ ID NO: 1499 - DNA, 20 bp, Artificial Sequence
  Synthetic
gagtaatgtggtcagagttg

SEQ ID NO: 1500 - DNA, 20 bp, Artificial Sequence
  Synthetic
gagcattggttgcggcgtgc

SEQ ID NO: 1501 - DNA, 20 bp, Artificial Sequence
  Synthetic
ggccgtctccagttctcatg

SEQ ID NO: 1502 - DNA, 20 bp, Artificial Sequence
  Synthetic
gctacagggagctctcaagc

SEQ ID NO: 1503 - DNA, 20 bp, Artificial Sequence
  Synthetic
gctgcttctcaggccctttc

SEQ ID NO: 1504 - DNA, 20 bp, Artificial Sequence
  Synthetic
gcgaatctgtgaatgacccg

SEQ ID NO: 1505 - DNA, 20 bp, Artificial Sequence
  Synthetic
gattcaggaaggaagagtgc

SEQ ID NO: 1506 - DNA, 20 bp, Artificial Sequence
  Synthetic
ggtaagaccagggagtcgga

SEQ ID NO: 1507 - DNA, 20 bp, Artificial Sequence
  Synthetic
gacaggcacagcgtgggtga

SEQ ID NO: 1508 - DNA, 20 bp, Artificial Sequence
  Synthetic
gtaagaccagggagtcggag

SEQ ID NO: 1509 - DNA, 20 bp, Artificial Sequence
  Synthetic
ggaatggaggtggcagggag

SEQ ID NO: 1510 - DNA, 20 bp, Artificial Sequence
  Synthetic
ggacccttccatggattccg

SEQ ID NO: 1511 - DNA, 20 bp, Artificial Sequence
  Synthetic
ggagtttcgctgcctgggaa

SEQ ID NO: 1512 - DNA, 20 bp, Artificial Sequence
  Synthetic
ggagtcacagagaaatctca

SEQ ID NO: 1513 - DNA, 20 bp, Artificial Sequence
  Synthetic
gagaaagctgctactcggcc

SEQ ID NO: 1514 - DNA, 20 bp, Artificial Sequence
  Synthetic
gggatacggtttacgcgcca

SEQ ID NO: 1515 - DNA, 20 bp, Artificial Sequence
  Synthetic
ggtaagcaggacataaacct

SEQ ID NO: 1516 - DNA, 20 bp, Artificial Sequence
  Synthetic
gctctatgcaaatagagccc

SEQ ID NO: 1517 - DNA, 20 bp, Artificial Sequence
  Synthetic
gctttcctgcggacgttggg

SEQ ID NO: 1518 - DNA, 20 bp, Artificial Sequence
  Synthetic
gggctaatcatgaagctgcc

SEQ ID NO: 1519 - DNA, 20 bp, Artificial Sequence
  Synthetic
gtctggagagaggagggtcc

SEQ ID NO: 1520 - DNA, 20 bp, Artificial Sequence
  Synthetic
ggcaaagtcctactctccca

SEQ ID NO: 1521 - DNA, 20 bp, Artificial Sequence
  Synthetic
ggtttgcaaagactggaatc

SEQ ID NO: 1522 - DNA, 20 bp, Artificial Sequence
  Synthetic
gagcaggcttcttaggaggt

SEQ ID NO: 1523 - DNA, 20 bp, Artificial Sequence
  Synthetic
gctgaggctctaccacatag

SEQ ID NO: 1524 - DNA, 20 bp, Artificial Sequence
  Synthetic
gttagactgggctggagggc

SEQ ID NO: 1525 - DNA, 20 bp, Artificial Sequence
  Synthetic
gcgccatttcctgttgggtg

SEQ ID NO: 1526 - DNA, 20 bp, Artificial Sequence
  Synthetic
gggcgttacagagcaggaaa

SEQ ID NO: 1527 - DNA, 20 bp, Artificial Sequence
  Synthetic
ggttctcgcttctcaactgc

SEQ ID NO: 1528 - DNA, 20 bp, Artificial Sequence
  Synthetic
ggctacaagcaggtgagtgg

SEQ ID NO: 1529 - DNA, 20 bp, Artificial Sequence
  Synthetic
gcactaggaaagggattaca

SEQ ID NO: 1530 - DNA, 20 bp, Artificial Sequence
  Synthetic
gtcagtggtgcagtcctacc

SEQ ID NO: 1531 - DNA, 20 bp, Artificial Sequence
  Synthetic
gagcctcgttggctgggctt

SEQ ID NO: 1532 - DNA, 20 bp, Artificial Sequence
  Synthetic
gtctcggacctcacaaaccc

SEQ ID NO: 1533 - DNA, 20 bp, Artificial Sequence
  Synthetic
ggcaggtaaggaaagagctg

SEQ ID NO: 1534 - DNA, 20 bp, Artificial Sequence
  Synthetic
gcctagtaacgcactctccg

SEQ ID NO: 1535 - DNA, 20 bp, Artificial Sequence
  Synthetic
gtctacttccttcaccgtca

SEQ ID NO: 1536 - DNA, 20 bp, Artificial Sequence
  Synthetic
gcaggtaaggaaagagctgg

SEQ ID NO: 1537 - DNA, 20 bp, Artificial Sequence
  Synthetic
gtaacgcactctccgcggag

SEQ ID NO: 1538 - DNA, 20 bp, Artificial Sequence
  Synthetic
gaatgcccaaattaacagta

SEQ ID NO: 1539 - DNA, 20 bp, Artificial Sequence
  Synthetic
gatcaggtgcaagtattgta

SEQ ID NO: 1540 - DNA, 20 bp, Artificial Sequence
  Synthetic
gtagaagtagaatacaactg

SEQ ID NO: 1541 - DNA, 20 bp, Artificial Sequence
  Synthetic
ggacttagtgagggcggaag

SEQ ID NO: 1542 - DNA, 20 bp, Artificial Sequence
  Synthetic
gtcatacatcttcatcaacc

SEQ ID NO: 1543 - DNA, 20 bp, Artificial Sequence
  Synthetic
gtgtgtggtgggatgggttg

SEQ ID NO: 1544 - DNA, 20 bp, Artificial Sequence
  Synthetic
gtttggcattcaacagagga

SEQ ID NO: 1545 - DNA, 20 bp, Artificial Sequence
  Synthetic
gagagtttctcagagcaact

SEQ ID NO: 1546 - DNA, 20 bp, Artificial Sequence
  Synthetic
gacctgggacttagtgaggg

SEQ ID NO: 1547 - DNA, 20 bp, Artificial Sequence
  Synthetic
gcgctgcgcatgtgcaaacg

SEQ ID NO: 1548 - DNA, 20 bp, Artificial Sequence
  Synthetic
gaagctgcgggagtgagacc

SEQ ID NO: 1549 - DNA, 20 bp, Artificial Sequence
  Synthetic
gtgaaccctggttagcacct

SEQ ID NO: 1550 - DNA, 20 bp, Artificial Sequence
  Synthetic
ggactttgttgctttaattt

SEQ ID NO: 1551 - DNA, 20 bp, Artificial Sequence
  Synthetic
ggaacagtcaagaatatctc

SEQ ID NO: 1552 - DNA, 20 bp, Artificial Sequence
  Synthetic
gtaatacactctgaaaccca

SEQ ID NO: 1553 - DNA, 20 bp, Artificial Sequence
  Synthetic
gtttctagtaaggactagct

SEQ ID NO: 1554 - DNA, 20 bp, Artificial Sequence
  Synthetic
gtgctttgtacttacataag

SEQ ID NO: 1555 - DNA, 20 bp, Artificial Sequence
  Synthetic
gccaggtgacacgtgaaccc

SEQ ID NO: 1556 - DNA, 20 bp, Artificial Sequence
  Synthetic
gtcttagccgttccgtgcaa

SEQ ID NO: 1557 - DNA, 20 bp, Artificial Sequence
  Synthetic
gtggagttgacctgagcaag

SEQ ID NO: 1558 - DNA, 20 bp, Artificial Sequence
  Synthetic
gggcgtggcttgtgttaaat

SEQ ID NO: 1559 - DNA, 20 bp, Artificial Sequence
  Synthetic
gttgcaatgtcagaatttcc

SEQ ID NO: 1560 - DNA, 20 bp, Artificial Sequence
  Synthetic
gcgagcagggactgagcaag

SEQ ID NO: 1561 - DNA, 20 bp, Artificial Sequence
  Synthetic
gccagacatcagggcggaag

SEQ ID NO: 1562 - DNA, 20 bp, Artificial Sequence
  Synthetic
ggagttgacctgagcaagtg

SEQ ID NO: 1563 - DNA, 20 bp, Artificial Sequence
  Synthetic
ggtccaaagtgaactatccg

SEQ ID NO: 1564 - DNA, 20 bp, Artificial Sequence
  Synthetic
gcggtctagcgcgtcagtag

SEQ ID NO: 1565 - DNA, 20 bp, Artificial Sequence
  Synthetic
gatgacgttatgcaaagaag

SEQ ID NO: 1566 - DNA, 20 bp, Artificial Sequence
  Synthetic
gaagagctggacacctggga

SEQ ID NO: 1567 - DNA, 20 bp, Artificial Sequence
  Synthetic
gaagccctagcttaagactt

SEQ ID NO: 1568 - DNA, 20 bp, Artificial Sequence
  Synthetic
ggctgccaaggactccttgg

SEQ ID NO: 1569 - DNA, 20 bp, Artificial Sequence
  Synthetic
gcggtctactaaagtcgtat

SEQ ID NO: 1570 - DNA, 20 bp, Artificial Sequence
  Synthetic
gtagacagatacaccggagg

SEQ ID NO: 1571 - DNA, 20 bp, Artificial Sequence
  Synthetic
gggcagagggaaggagatgg

SEQ ID NO: 1572 - DNA, 20 bp, Artificial Sequence
  Synthetic
gcccaacagcattcgtgtct

SEQ ID NO: 1573 - DNA, 20 bp, Artificial Sequence
  Synthetic
ggtctgtccagggaggaaag

SEQ ID NO: 1574 - DNA, 20 bp, Artificial Sequence
  Synthetic
gctaaggaggaaatgagtgg

SEQ ID NO: 1575 - DNA, 20 bp, Artificial Sequence
  Synthetic
gtttgtcaaggtcttaggga

SEQ ID NO: 1576 - DNA, 20 bp, Artificial Sequence
  Synthetic
gtatgagagaagccgaggat

SEQ ID NO: 1577 - DNA, 20 bp, Artificial Sequence
  Synthetic
gagctgatcaaagtctcctt

SEQ ID NO: 1578 - DNA, 20 bp, Artificial Sequence
  Synthetic
gataactgccgaatgcaact

SEQ ID NO: 1579 - DNA, 20 bp, Artificial Sequence
  Synthetic
gaagcaatcatttcgtgcga

SEQ ID NO: 1580 - DNA, 20 bp, Artificial Sequence
  Synthetic
gcggatttgcctctagatgc

SEQ ID NO: 1581 - DNA, 20 bp, Artificial Sequence
  Synthetic
gaacttgtcactgggaagga

SEQ ID NO: 1582 - DNA, 20 bp, Artificial Sequence
  Synthetic
gaccctacagattcattccc

SEQ ID NO: 1583 - DNA, 20 bp, Artificial Sequence
  Synthetic
ggttattctcacgtagctgg

SEQ ID NO: 1584 - DNA, 20 bp, Artificial Sequence
  Synthetic
gcagctgattgtctgctcca

SEQ ID NO: 1585 - DNA, 20 bp, Artificial Sequence
  Synthetic
gacctctcctaaaggtcaga

SEQ ID NO: 1586 - DNA, 20 bp, Artificial Sequence
  Synthetic
gcagagatgaagttgggaaa

SEQ ID NO: 1587 - DNA, 20 bp, Artificial Sequence
  Synthetic
gggtggagacccttcctgga

SEQ ID NO: 1588 - DNA, 20 bp, Artificial Sequence
  Synthetic
ggctcctctgcagcaggcta

SEQ ID NO: 1589 - DNA, 20 bp, Artificial Sequence
  Synthetic
gctcacactgggtgagcgac

SEQ ID NO: 1590 - DNA, 20 bp, Artificial Sequence
  Synthetic
ggcaaagcctgctgaataca

SEQ ID NO: 1591 - DNA, 20 bp, Artificial Sequence
  Synthetic
gaggagattccaggagaggg

SEQ ID NO: 1592 - DNA, 20 bp, Artificial Sequence
  Synthetic
ggaatacttcccaccctcca

SEQ ID NO: 1593 - DNA, 20 bp, Artificial Sequence
  Synthetic
ggaggaacctgtctccgacg

SEQ ID NO: 1594 - DNA, 20 bp, Artificial Sequence
  Synthetic
gggagtgtggatccctagaa

SEQ ID NO: 1595 - DNA, 20 bp, Artificial Sequence
  Synthetic
gagagatcccgctggtctcc

SEQ ID NO: 1596 - DNA, 20 bp, Artificial Sequence
  Synthetic
ggttgaggatcccacctttg

SEQ ID NO: 1597 - DNA, 20 bp, Artificial Sequence
  Synthetic
ggagactgggcaaagtcaag

SEQ ID NO: 1598 - DNA, 20 bp, Artificial Sequence
  Synthetic
gagagccttagacgcagtga

SEQ ID NO: 1599 - DNA, 20 bp, Artificial Sequence
  Synthetic
gcaaagagcccaggagggac

SEQ ID NO: 1600 - DNA, 20 bp, Artificial Sequence
  Synthetic
gtgggaagggtctgtaggta

SEQ ID NO: 1601 - DNA, 20 bp, Artificial Sequence
  Synthetic
gggagggcttcacgtcactc

SEQ ID NO: 1602 - DNA, 20 bp, Artificial Sequence
  Synthetic
gccctcccatccaagagtgg

SEQ ID NO: 1603 - DNA, 20 bp, Artificial Sequence
  Synthetic
ggatctgttggttcttgtga

SEQ ID NO: 1604 - DNA, 20 bp, Artificial Sequence
  Synthetic
gtcactttccaggtgtcacc

SEQ ID NO: 1605 - DNA, 20 bp, Artificial Sequence
  Synthetic
gggcgtttgaagtaatggcg

SEQ ID NO: 1606 - DNA, 20 bp, Artificial Sequence
  Synthetic
gaagctctaagcaagggcgt

SEQ ID NO: 1607 - DNA, 20 bp, Artificial Sequence
  Synthetic
ggtgtgtagtgtgtagcgta

SEQ ID NO: 1608 - DNA, 20 bp, Artificial Sequence
  Synthetic
gatgaaggcagtgtcttcct

SEQ ID NO: 1609 - DNA, 20 bp, Artificial Sequence
  Synthetic
gaagtggttccataccatca

SEQ ID NO: 1610 - DNA, 20 bp, Artificial Sequence
  Synthetic
gtagcgtaaggtgtgttgag

SEQ ID NO: 1611 - DNA, 20 bp, Artificial Sequence
  Synthetic
gctccgggatctacgtagcc

SEQ ID NO: 1612 - DNA, 20 bp, Artificial Sequence
  Synthetic
gcaaatagaggtcccggcgg

SEQ ID NO: 1613 - DNA, 20 bp, Artificial Sequence
  Synthetic
gtaacctgagtcccaccgcc

SEQ ID NO: 1614 - DNA, 20 bp, Artificial Sequence
  Synthetic
ggctcggagtatttatgggc

SEQ ID NO: 1615 - DNA, 20 bp, Artificial Sequence
  Synthetic
gctacgtcacggagctttcc

SEQ ID NO: 1616 - DNA, 20 bp, Artificial Sequence
  Synthetic
gtttggaggagaacattggg

SEQ ID NO: 1617 - DNA, 20 bp, Artificial Sequence
  Synthetic
gagtgggagtgttgacaaga

SEQ ID NO: 1618 - DNA, 20 bp, Artificial Sequence
  Synthetic
gttgtcctcattgctgcctg

SEQ ID NO: 1619 - DNA, 20 bp, Artificial Sequence
  Synthetic
ggctcagataaatagactgg

SEQ ID NO: 1620 - DNA, 20 bp, Artificial Sequence
  Synthetic
ggctggagagccaggcaatt

SEQ ID NO: 1621 - DNA, 20 bp, Artificial Sequence
  Synthetic
gcaaagagggtaatcctctc

SEQ ID NO: 1622 - DNA, 20 bp, Artificial Sequence
  Synthetic
ggcaccctcaggcagcaatg

SEQ ID NO: 1623 - DNA, 20 bp, Artificial Sequence
  Synthetic
gtgttgacaagaaggaagag

SEQ ID NO: 1624 - DNA, 20 bp, Artificial Sequence
  Synthetic
gaatcacaccgggttggcgg

SEQ ID NO: 1625 - DNA, 20 bp, Artificial Sequence
  Synthetic
gagtaacataattagatggc

SEQ ID NO: 1626 - DNA, 20 bp, Artificial Sequence
  Synthetic
gtggacccaattattctgct

SEQ ID NO: 1627 - DNA, 20 bp, Artificial Sequence
  Synthetic
ggctcaaggctttcagcata

SEQ ID NO: 1628 - DNA, 20 bp, Artificial Sequence
  Synthetic
gccatatatcccttcatata

SEQ ID NO: 1629 - DNA, 20 bp, Artificial Sequence
  Synthetic
ggtcaaacatgcaaatgcac

SEQ ID NO: 1630 - DNA, 20 bp, Artificial Sequence
  Synthetic
gacatcagtgagcgggatcg

SEQ ID NO: 1631 - DNA, 20 bp, Artificial Sequence
  Synthetic
ggatggctgactgagcactg

SEQ ID NO: 1632 - DNA, 20 bp, Artificial Sequence
  Synthetic
gcaagaagtccactgttcac

SEQ ID NO: 1633 - DNA, 20 bp, Artificial Sequence
  Synthetic
gggttaatgagtagccaggt

SEQ ID NO: 1634 - DNA, 20 bp, Artificial Sequence
  Synthetic
gcagcttgttccaaggtgta

SEQ ID NO: 1635 - DNA, 20 bp, Artificial Sequence
  Synthetic
gattaagctacatatccttg

SEQ ID NO: 1636 - DNA, 20 bp, Artificial Sequence
  Synthetic
ggtgaaggagcgcgtgtgtg

SEQ ID NO: 1637 - DNA, 20 bp, Artificial Sequence
  Synthetic
gaggatcgtttattagccat

SEQ ID NO: 1638 - DNA, 20 bp, Artificial Sequence
  Synthetic
gacagtaatataacgcgata

SEQ ID NO: 1639 - DNA, 20 bp, Artificial Sequence
  Synthetic
gaggtaaggttaggattact

SEQ ID NO: 1640 - DNA, 20 bp, Artificial Sequence
  Synthetic
gtccctggaggtcttgggag

SEQ ID NO: 1641 - DNA, 20 bp, Artificial Sequence
  Synthetic
gttgggcgctgagaagaggg

SEQ ID NO: 1642 - DNA, 20 bp, Artificial Sequence
  Synthetic
gctgcaaacgcaggacatcc

SEQ ID NO: 1643 - DNA, 20 bp, Artificial Sequence
  Synthetic
ggtccctggaggtcttggga

SEQ ID NO: 1644 - DNA, 20 bp, Artificial Sequence
  Synthetic
gggagtataaatagccggcc

SEQ ID NO: 1645 - DNA, 20 bp, Artificial Sequence
  Synthetic
gcagccctgacctagaggaa

SEQ ID NO: 1646 - DNA, 20 bp, Artificial Sequence
  Synthetic
gcagatactaatggagtggg

SEQ ID NO: 1647 - DNA, 20 bp, Artificial Sequence
  Synthetic
gcaggcagatactaatggag

SEQ ID NO: 1648 - DNA, 20 bp, Artificial Sequence
  Synthetic
gacgtacgccgaagacctgg

SEQ ID NO: 1649 - DNA, 20 bp, Artificial Sequence
  Synthetic
gcttcagcaaccatcgcgtt

SEQ ID NO: 1650 - DNA, 20 bp, Artificial Sequence
  Synthetic
gagtcattacaaagacaaac

SEQ ID NO: 1651 - DNA, 20 bp, Artificial Sequence
  Synthetic
ggacggaatcaatactcagg

SEQ ID NO: 1652 - DNA, 20 bp, Artificial Sequence
  Synthetic
gctggttctcccacattcca

SEQ ID NO: 1653 - DNA, 20 bp, Artificial Sequence
  Synthetic
gagagcgccacaggcaccaa

SEQ ID NO: 1654 - DNA, 20 bp, Artificial Sequence
  Synthetic
ggaaagcttcactatgcctg

SEQ ID NO: 1655 - DNA, 20 bp, Artificial Sequence
  Synthetic
gcaaatctctagccatgggt

SEQ ID NO: 1656 - DNA, 20 bp, Artificial Sequence
  Synthetic
gacggcctaggcagtcatct

SEQ ID NO: 1657 - DNA, 20 bp, Artificial Sequence
  Synthetic
gaggccttactcaggctgcc

SEQ ID NO: 1658 - DNA, 20 bp, Artificial Sequence
  Synthetic
gaaagcttcactatgcctgt

SEQ ID NO: 1659 - DNA, 20 bp, Artificial Sequence
  Synthetic
ggaaaggcctaggctgggta

SEQ ID NO: 1660 - DNA, 20 bp, Artificial Sequence
  Synthetic
gtgtaggcagagcagagggc

SEQ ID NO: 1661 - DNA, 20 bp, Artificial Sequence
  Synthetic
ggtgtagcagggtcctggaa

SEQ ID NO: 1662 - DNA, 20 bp, Artificial Sequence
  Synthetic
ggaacggaacccacgaaagg

SEQ ID NO: 1663 - DNA, 20 bp, Artificial Sequence
  Synthetic
gcctgagattgagagaggaa

SEQ ID NO: 1664 - DNA, 20 bp, Artificial Sequence
  Synthetic
gtaggactcaactctgtgga

SEQ ID NO: 1665 - DNA, 20 bp, Artificial Sequence
  Synthetic
gtgctttaatattggaggct

SEQ ID NO: 1666 - DNA, 20 bp, Artificial Sequence
  Synthetic
gaaacaggacttatttagaa

SEQ ID NO: 1667 - DNA, 20 bp, Artificial Sequence
  Synthetic
gccaaggatcctaagcacag

SEQ ID NO: 1668 - DNA, 20 bp, Artificial Sequence
  Synthetic
gtgtacagcaccacctactt

SEQ ID NO: 1669 - DNA, 20 bp, Artificial Sequence
  Synthetic
gcgtcctcctgcttgctgat

SEQ ID NO: 1670 - DNA, 20 bp, Artificial Sequence
  Synthetic
gcagtcctccttgacccaat

SEQ ID NO: 1671 - DNA, 20 bp, Artificial Sequence
  Synthetic
gctgggaagatgcagtcaat

SEQ ID NO: 1672 - DNA, 20 bp, Artificial Sequence
  Synthetic
gacaggagaaagccaaagaa

SEQ ID NO: 1673 - DNA, 20 bp, Artificial Sequence
  Synthetic
ggacaacgtatactgaaccg

SEQ ID NO: 1674 - DNA, 20 bp, Artificial Sequence
  Synthetic
gagtttagggacaggaggga

SEQ ID NO: 1675 - DNA, 20 bp, Artificial Sequence
  Synthetic
gatcctggccattgtcctca

SEQ ID NO: 1676 - DNA, 20 bp, Artificial Sequence
  Synthetic
gtaccctgtggtttcaagac

SEQ ID NO: 1677 - DNA, 20 bp, Artificial Sequence
  Synthetic
gaagaggcttaagttatttg

SEQ ID NO: 1678 - DNA, 20 bp, Artificial Sequence
  Synthetic
gtcggatagagttactgtcg

SEQ ID NO: 1679 - DNA, 20 bp, Artificial Sequence
  Synthetic
gagagttgggcattgctcgg

SEQ ID NO: 1680 - DNA, 20 bp, Artificial Sequence
  Synthetic
ggctggaggaactgtataca

SEQ ID NO: 1681 - DNA, 20 bp, Artificial Sequence
  Synthetic
gcgtacttatcccagaccaa

SEQ ID NO: 1682 - DNA, 20 bp, Artificial Sequence
  Synthetic
gacacaaggctcctagtttg

SEQ ID NO: 1683 - DNA, 20 bp, Artificial Sequence
  Synthetic
gttgtcatcttctctttaac

SEQ ID NO: 1684 - DNA, 20 bp, Artificial Sequence
  Synthetic
gatggtacaaggtagacact

SEQ ID NO: 1685 - DNA, 20 bp, Artificial Sequence
  Synthetic
gaaacaagtcacacttggtc

SEQ ID NO: 1686 - DNA, 20 bp, Artificial Sequence
  Synthetic
gtgcacgggacggactaaca

SEQ ID NO: 1687 - DNA, 20 bp, Artificial Sequence
  Synthetic
ggaccaagctaagttggtaa

SEQ ID NO: 1688 - DNA, 20 bp, Artificial Sequence
  Synthetic
gaaatcaacacccaattcca

SEQ ID NO: 1689 - DNA, 20 bp, Artificial Sequence
  Synthetic
ggtagacacttggtaaatag

SEQ ID NO: 1690 - DNA, 20 bp, Artificial Sequence
  Synthetic
ggacattcgtacttcctcgc

SEQ ID NO: 1691 - DNA, 20 bp, Artificial Sequence
  Synthetic
ggcttagttatcttatgcta

SEQ ID NO: 1692 - DNA, 20 bp, Artificial Sequence
  Synthetic
ggagcctgaggatgacctgt

SEQ ID NO: 1693 - DNA, 20 bp, Artificial Sequence
  Synthetic
gcagagatccggagaaggca

SEQ ID NO: 1694 - DNA, 20 bp, Artificial Sequence
  Synthetic
ggtctccttggagcaaggtc

SEQ ID NO: 1695 - DNA, 20 bp, Artificial Sequence
  Synthetic
ggagtggcatcctagcttct

SEQ ID NO: 1696 - DNA, 20 bp, Artificial Sequence
  Synthetic
gttctctggagaatctaggc

SEQ ID NO: 1697 - DNA, 20 bp, Artificial Sequence
  Synthetic
gtcgcatatggcgggagagg

SEQ ID NO: 1698 - DNA, 20 bp, Artificial Sequence
  Synthetic
gatgcagagtggagggtagg

SEQ ID NO: 1699 - DNA, 20 bp, Artificial Sequence
  Synthetic
gagagccctaacaccgagtt

SEQ ID NO: 1700 - DNA, 20 bp, Artificial Sequence
  Synthetic
gcttctccagaccaaggctc

SEQ ID NO: 1701 - DNA, 20 bp, Artificial Sequence
  Synthetic
gcagagtggagggtaggagg

SEQ ID NO: 1702 - DNA, 20 bp, Artificial Sequence
  Synthetic
gtctcctgtttggtttcttg

SEQ ID NO: 1703 - DNA, 20 bp, Artificial Sequence
  Synthetic
gctaatgatgctaatgctgg

SEQ ID NO: 1704 - DNA, 20 bp, Artificial Sequence
  Synthetic
ggcctccagtctcttgcatg

SEQ ID NO: 1705 - DNA, 20 bp, Artificial Sequence
  Synthetic
gaagcgggttagcccttgcc

SEQ ID NO: 1706 - DNA, 20 bp, Artificial Sequence
  Synthetic
gctaggccatctatgagctc

SEQ ID NO: 1707 - DNA, 20 bp, Artificial Sequence
  Synthetic
ggtgtgggtgcagtaggagg

SEQ ID NO: 1708 - DNA, 20 bp, Artificial Sequence
  Synthetic
gacatctgttgtcccagggc

SEQ ID NO: 1709 - DNA, 20 bp, Artificial Sequence
  Synthetic
gaagactggagcccaaagaa

SEQ ID NO: 1710 - DNA, 20 bp, Artificial Sequence
  Synthetic
gactgcaaacgcgtggaccc

SEQ ID NO: 1711 - DNA, 20 bp, Artificial Sequence
  Synthetic
ggaaaggagtcttgggtcct

SEQ ID NO: 1712 - DNA, 20 bp, Artificial Sequence
  Synthetic
gactttgcggataaataatc

SEQ ID NO: 1713 - DNA, 20 bp, Artificial Sequence
  Synthetic
gttctgccaggatctccaac

SEQ ID NO: 1714 - DNA, 20 bp, Artificial Sequence
  Synthetic
gtgggtgagaagctacagcg

SEQ ID NO: 1715 - DNA, 20 bp, Artificial Sequence
  Synthetic
gagaatctcccgacttctct

SEQ ID NO: 1716 - DNA, 20 bp, Artificial Sequence
  Synthetic
gtgagggcaactggagattt

SEQ ID NO: 1717 - DNA, 20 bp, Artificial Sequence
  Synthetic
gccaggatggcagacaggta

SEQ ID NO: 1718 - DNA, 20 bp, Artificial Sequence
  Synthetic
gatccgagaaagctagaatt

SEQ ID NO: 1719 - DNA, 20 bp, Artificial Sequence
  Synthetic
gtcagaaactatgacatttg

SEQ ID NO: 1720 - DNA, 20 bp, Artificial Sequence
  Synthetic
gcttgccaggacgtcagcac

SEQ ID NO: 1721 - DNA, 20 bp, Artificial Sequence
  Synthetic
gtggagaagcctcagaaagt

SEQ ID NO: 1722 - DNA, 20 bp, Artificial Sequence
  Synthetic
gtgcaggagacgcatgcata

SEQ ID NO: 1723 - DNA, 20 bp, Artificial Sequence
  Synthetic
gaggcacgtgtccaggagac

SEQ ID NO: 1724 - DNA, 20 bp, Artificial Sequence
  Synthetic
gaactgccaggtcctggtga

SEQ ID NO: 1725 - DNA, 20 bp, Artificial Sequence
  Synthetic
gagcctacagaacccaggca

SEQ ID NO: 1726 - DNA, 20 bp, Artificial Sequence
  Synthetic
gtggcctggtggctcaacat

SEQ ID NO: 1727 - DNA, 20 bp, Artificial Sequence
  Synthetic
gcaagggcaataactcccaa

SEQ ID NO: 1728 - DNA, 20 bp, Artificial Sequence
  Synthetic
gggcacggccactttaaagg

SEQ ID NO: 1729 - DNA, 20 bp, Artificial Sequence
  Synthetic
gtggctcaacataggaaatg

SEQ ID NO: 1730 - DNA, 20 bp, Artificial Sequence
  Synthetic
gcctcctataaggaactgcc

SEQ ID NO: 1731 - DNA, 20 bp, Artificial Sequence
  Synthetic
ggcctggtatgtaagtggga

SEQ ID NO: 1732 - DNA, 20 bp, Artificial Sequence
  Synthetic
gatgataccatcttggcctg

SEQ ID NO: 1733 - DNA, 20 bp, Artificial Sequence
  Synthetic
gtgtttctttaagcgtcttt

SEQ ID NO: 1734 - DNA, 20 bp, Artificial Sequence
  Synthetic
gcttggaaacttgtgagcgg

SEQ ID NO: 1735 - DNA, 20 bp, Artificial Sequence
  Synthetic
ggtgtttctttaagcgtctt

SEQ ID NO: 1736 - DNA, 20 bp, Artificial Sequence
  Synthetic
gactgtttgcggaaacgcag

SEQ ID NO: 1737 - DNA, 20 bp, Artificial Sequence
  Synthetic
ggcaccgttcagacccactc

SEQ ID NO: 1738 - DNA, 20 bp, Artificial Sequence
  Synthetic
gcccgagaccaaatcggagc

SEQ ID NO: 1739 - DNA, 20 bp, Artificial Sequence
  Synthetic
gagggtgtgcgcagagactt

SEQ ID NO: 1740 - DNA, 20 bp, Artificial Sequence
  Synthetic
gctctatggcgccggagaaa

SEQ ID NO: 1741 - DNA, 20 bp, Artificial Sequence
  Synthetic
gtcctgctgtttgtgcaccc

SEQ ID NO: 1742 - DNA, 20 bp, Artificial Sequence
  Synthetic
gctcctaagtctagtgtgta

SEQ ID NO: 1743 - DNA, 20 bp, Artificial Sequence
  Synthetic
gtttgggatcctcaaatata

SEQ ID NO: 1744 - DNA, 20 bp, Artificial Sequence
  Synthetic
ggtacctggctggagagcag

SEQ ID NO: 1745 - DNA, 20 bp, Artificial Sequence
  Synthetic
gagtgaggagggtacctggc

SEQ ID NO: 1746 - DNA, 20 bp, Artificial Sequence
  Synthetic
gttccaaagatcaacctgag

SEQ ID NO: 1747 - DNA, 20 bp, Artificial Sequence
  Synthetic
gaacctgcctgaaacttcca

SEQ ID NO: 1748 - DNA, 20 bp, Artificial Sequence
  Synthetic
gccgctaccgctatcctgta

SEQ ID NO: 1749 - DNA, 20 bp, Artificial Sequence
  Synthetic
gctaccgctatcctgtaagg

SEQ ID NO: 1750 - DNA, 20 bp, Artificial Sequence
  Synthetic
gaatcctccttacaggatag

SEQ ID NO: 1751 - DNA, 20 bp, Artificial Sequence
  Synthetic
gaaagcacggtccctcaaat

SEQ ID NO: 1752 - DNA, 20 bp, Artificial Sequence
  Synthetic
gacttgcatagagcagagcc

SEQ ID NO: 1753 - DNA, 20 bp, Artificial Sequence
  Synthetic
gggagcccacggtgatactg

SEQ ID NO: 1754 - DNA, 20 bp, Artificial Sequence
  Synthetic
gttagcgcaggactgagtaa

SEQ ID NO: 1755 - DNA, 20 bp, Artificial Sequence
  Synthetic
gaaatcagttgacacacctg

SEQ ID NO: 1756 - DNA, 20 bp, Artificial Sequence
  Synthetic
gaataaagatggtacggttt

SEQ ID NO: 1757 - DNA, 20 bp, Artificial Sequence
  Synthetic
gagcgcagctccagagaaag

SEQ ID NO: 1758 - DNA, 20 bp, Artificial Sequence
  Synthetic
gaggattgtacggccgcctc

SEQ ID NO: 1759 - DNA, 20 bp, Artificial Sequence
  Synthetic
gacaagaacaagagccgaca

SEQ ID NO: 1760 - DNA, 20 bp, Artificial Sequence
  Synthetic
gggcgatacctgtaacccgc

SEQ ID NO: 1761 - DNA, 20 bp, Artificial Sequence
  Synthetic
gagagtgggtaggagaagta

SEQ ID NO: 1762 - DNA, 20 bp, Artificial Sequence
  Synthetic
gctgaataggaacccaacaa

SEQ ID NO: 1763 - DNA, 20 bp, Artificial Sequence
  Synthetic
gctgcagcagataggaggaa

SEQ ID NO: 1764 - DNA, 20 bp, Artificial Sequence
  Synthetic
gagttaccaaaggaagagat

SEQ ID NO: 1765 - DNA, 20 bp, Artificial Sequence
  Synthetic
gaccaaaggcccgagcgtag

SEQ ID NO: 1766 - DNA, 20 bp, Artificial Sequence
  Synthetic
gaggaaaggaattatatgaa

SEQ ID NO: 1767 - DNA, 20 bp, Artificial Sequence
  Synthetic
ggaagtgaccagaatgcatt

SEQ ID NO: 1768 - DNA, 20 bp, Artificial Sequence
  Synthetic
gatgcggcaagcaagaggga

SEQ ID NO: 1769 - DNA, 20 bp, Artificial Sequence
  Synthetic
gcgcactcacacacgcttgc

SEQ ID NO: 1770 - DNA, 20 bp, Artificial Sequence
  Synthetic
gtcactgagcatcttattca

SEQ ID NO: 1771 - DNA, 20 bp, Artificial Sequence
  Synthetic
gacagtagtcagtaggctat

SEQ ID NO: 1772 - DNA, 20 bp, Artificial Sequence
  Synthetic
gtttacagacagtagtcagt

SEQ ID NO: 1773 - DNA, 20 bp, Artificial Sequence
  Synthetic
gagcgtgcaaactatgggtt

SEQ ID NO: 1774 - DNA, 20 bp, Artificial Sequence
  Synthetic
gcatctgctgtcttgaggtt

SEQ ID NO: 1775 - DNA, 20 bp, Artificial Sequence
  Synthetic
gtggaagtaagaatggtatc

SEQ ID NO: 1776 - DNA, 20 bp, Artificial Sequence
  Synthetic
gtttggtccagagtctgcac

SEQ ID NO: 1777 - DNA, 20 bp, Artificial Sequence
  Synthetic
gactctactcttagagaagc

SEQ ID NO: 1778 - DNA, 20 bp, Artificial Sequence
  Synthetic
ggagaatgatgttgggtgtt

SEQ ID NO: 1779 - DNA, 20 bp, Artificial Sequence
  Synthetic
gagtgaagtgttgggtcggg

SEQ ID NO: 1780 - DNA, 20 bp, Artificial Sequence
  Synthetic
gtgagagagacagggagaca

SEQ ID NO: 1781 - DNA, 20 bp, Artificial Sequence
  Synthetic
gctgggttaagcttgcactg

SEQ ID NO: 1782 - DNA, 20 bp, Artificial Sequence
  Synthetic
ggcaggtaaaggtggtgtga

SEQ ID NO: 1783 - DNA, 20 bp, Artificial Sequence
  Synthetic
gttcacagaacccaaggagg

SEQ ID NO: 1784 - DNA, 20 bp, Artificial Sequence
  Synthetic
gagtccatcctggtgaggat

SEQ ID NO: 1785 - DNA, 20 bp, Artificial Sequence
  Synthetic
gacctggaaagagtgtggga

SEQ ID NO: 1786 - DNA, 20 bp, Artificial Sequence
  Synthetic
gctcccggtttgtggtcacg

SEQ ID NO: 1787 - DNA, 20 bp, Artificial Sequence
  Synthetic
gctttcatagacatcttcca

SEQ ID NO: 1788 - DNA, 20 bp, Artificial Sequence
  Synthetic
gggacattctatctcacaaa

SEQ ID NO: 1789 - DNA, 20 bp, Artificial Sequence
  Synthetic
gggtggagtgctcactgatg

SEQ ID NO: 1790 - DNA, 20 bp, Artificial Sequence
  Synthetic
gctcactctaactagttatc

SEQ ID NO: 1791 - DNA, 20 bp, Artificial Sequence
  Synthetic
ggtggagtgctcactgatga

SEQ ID NO: 1792 - DNA, 20 bp, Artificial Sequence
  Synthetic
ggaagccacatcgaacctac

SEQ ID NO: 1793 - DNA, 20 bp, Artificial Sequence
  Synthetic
gttctggatctcagccgggt

SEQ ID NO: 1794 - DNA, 20 bp, Artificial Sequence
  Synthetic
gatgggtgtgccataagggt

SEQ ID NO: 1795 - DNA, 20 bp, Artificial Sequence
  Synthetic
gtgcgatgtgaagaatggag

SEQ ID NO: 1796 - DNA, 20 bp, Artificial Sequence
  Synthetic
gggacactggtttcagccct

SEQ ID NO: 1797 - DNA, 20 bp, Artificial Sequence
  Synthetic
gtaggcacaggccgactcaa

SEQ ID NO: 1798 - DNA, 20 bp, Artificial Sequence
  Synthetic
gcgtcctactacgaggaacc

SEQ ID NO: 1799 - DNA, 20 bp, Artificial Sequence
  Synthetic
gtcaattcagaagtcaacct

SEQ ID NO: 1800 - DNA, 20 bp, Artificial Sequence
  Synthetic
gtatctgtatcccagtagag

SEQ ID NO: 1801 - DNA, 20 bp, Artificial Sequence
  Synthetic
gcaggaaccacaaggctatg

SEQ ID NO: 1802 - DNA, 20 bp, Artificial Sequence
  Synthetic
gtcatgtagaaaccaactca

SEQ ID NO: 1803 - DNA, 20 bp, Artificial Sequence
  Synthetic
gtccacctcttacatcatgg

SEQ ID NO: 1804 - DNA, 20 bp, Artificial Sequence
  Synthetic
ggtgagtgagtgacaccctc

SEQ ID NO: 1805 - DNA, 20 bp, Artificial Sequence
  Synthetic
gcttcaggtattggaatgaa

SEQ ID NO: 1806 - DNA, 20 bp, Artificial Sequence
  Synthetic
ggtgggactgttggaaggga

SEQ ID NO: 1807 - DNA, 20 bp, Artificial Sequence
  Synthetic
gcagggagactgtgtaggta

SEQ ID NO: 1808 - DNA, 20 bp, Artificial Sequence
  Synthetic
ggttagtgggctccaagtgt

SEQ ID NO: 1809 - DNA, 20 bp, Artificial Sequence
  Synthetic
gagagggcctgtgcttctgt

SEQ ID NO: 1810 - DNA, 20 bp, Artificial Sequence
  Synthetic
gggatattaaggcaggatgc

SEQ ID NO: 1811 - DNA, 20 bp, Artificial Sequence
  Synthetic
gaagagggttgaaggtaaac

SEQ ID NO: 1812 - DNA, 20 bp, Artificial Sequence
  Synthetic
gacaaaggtctaaggagtat

SEQ ID NO: 1813 - DNA, 20 bp, Artificial Sequence
  Synthetic
gagcgattgtaaatgtgtga

SEQ ID NO: 1814 - DNA, 20 bp, Artificial Sequence
  Synthetic
gtgaatgcgtgcaatgagct

SEQ ID NO: 1815 - DNA, 20 bp, Artificial Sequence
  Synthetic
ggtaagacttcaaatgcagg

SEQ ID NO: 1816 - DNA, 20 bp, Artificial Sequence
  Synthetic
gggagggcgggaagttgtta

SEQ ID NO: 1817 - DNA, 20 bp, Artificial Sequence
  Synthetic
gccaactcacgagccaggaa

SEQ ID NO: 1818 - DNA, 20 bp, Artificial Sequence
  Synthetic
gaagacttgcaggaagagtg

SEQ ID NO: 1819 - DNA, 20 bp, Artificial Sequence
  Synthetic
gtgggactacactgtagggt

SEQ ID NO: 1820 - DNA, 20 bp, Artificial Sequence
  Synthetic
ggaaacactcctatttctaa

SEQ ID NO: 1821 - DNA, 20 bp, Artificial Sequence
  Synthetic
gacatttgaattggcttctt

SEQ ID NO: 1822 - DNA, 20 bp, Artificial Sequence
  Synthetic
gtagtcccacccattccgaa

SEQ ID NO: 1823 - DNA, 20 bp, Artificial Sequence
  Synthetic
ggcataaagggtttcttgca

SEQ ID NO: 1824 - DNA, 20 bp, Artificial Sequence
  Synthetic
gaagaagccacggaaaccaa

SEQ ID NO: 1825 - DNA, 20 bp, Artificial Sequence
  Synthetic
ggagtgtttccattcggaat

SEQ ID NO: 1826 - DNA, 20 bp, Artificial Sequence
  Synthetic
gggtgggactacattgtagg

SEQ ID NO: 1827 - DNA, 20 bp, Artificial Sequence
  Synthetic
gtcttgcccaaccattccac

SEQ ID NO: 1828 - DNA, 20 bp, Artificial Sequence
  Synthetic
gtctaggcaggaaccctcgc

SEQ ID NO: 1829 - DNA, 20 bp, Artificial Sequence
  Synthetic
gccagataacaagatgagtg

SEQ ID NO: 1830 - DNA, 20 bp, Artificial Sequence
  Synthetic
gagctgccctttgtttctta

SEQ ID NO: 1831 - DNA, 20 bp, Artificial Sequence
  Synthetic
gtgaggaaatccctgtataa

SEQ ID NO: 1832 - DNA, 20 bp, Artificial Sequence
  Synthetic
gacggactttcccgagactg

SEQ ID NO: 1833 - DNA, 20 bp, Artificial Sequence
  Synthetic
gagtgtcaatctctgggtct

SEQ ID NO: 1834 - DNA, 20 bp, Artificial Sequence
  Synthetic
gcaagagtcacctttataca

SEQ ID NO: 1835 - DNA, 20 bp, Artificial Sequence
  Synthetic
gccaggctaggctttaactc

SEQ ID NO: 1836 - DNA, 20 bp, Artificial Sequence
  Synthetic
ggcacttgggttgggtggtt

SEQ ID NO: 1837 - DNA, 20 bp, Artificial Sequence
  Synthetic
gttgggtggttaggcttctg

SEQ ID NO: 1838 - DNA, 20 bp, Artificial Sequence
  Synthetic
gctcaaaggctctatcttgg

SEQ ID NO: 1839 - DNA, 20 bp, Artificial Sequence
  Synthetic
ggctgagaacttggtaggga

SEQ ID NO: 1840 - DNA, 20 bp, Artificial Sequence
  Synthetic
gccctttgaacccagagggt

SEQ ID NO: 1841 - DNA, 20 bp, Artificial Sequence
  Synthetic
gtgggccaaccacaaagcag

SEQ ID NO: 1842 - DNA, 20 bp, Artificial Sequence
  Synthetic
gttcgggcgttatgcccagg

SEQ ID NO: 1843 - DNA, 20 bp, Artificial Sequence
  Synthetic
gcagggctgagaacttggta

SEQ ID NO: 1844 - DNA, 20 bp, Artificial Sequence
  Synthetic
ggcaagctcaggcaaggcca

SEQ ID NO: 1845 - DNA, 20 bp, Artificial Sequence
  Synthetic
ggagccgaaaggtggagtgg

SEQ ID NO: 1846 - DNA, 20 bp, Artificial Sequence
  Synthetic
gggtcagcaataaacaacaa

SEQ ID NO: 1847 - DNA, 20 bp, Artificial Sequence
  Synthetic
gcaggatttattgagatact

SEQ ID NO: 1848 - DNA, 20 bp, Artificial Sequence
  Synthetic
ggacttctatcaacctagag

SEQ ID NO: 1849 - DNA, 20 bp, Artificial Sequence
  Synthetic
ggagtgttaggacatgctct

SEQ ID NO: 1850 - DNA, 20 bp, Artificial Sequence
  Synthetic
gagaacgggagccaagagaa

SEQ ID NO: 1851 - DNA, 20 bp, Artificial Sequence
  Synthetic
gagaggtggcgctggaagag

SEQ ID NO: 1852 - DNA, 20 bp, Artificial Sequence
  Synthetic
gccttatccgaatcactcaa

SEQ ID NO: 1853 - DNA, 20 bp, Artificial Sequence
  Synthetic
gagtcaaatagttaacaggt

SEQ ID NO: 1854 - DNA, 20 bp, Artificial Sequence
  Synthetic
gagcgagagatgcgaaggga

SEQ ID NO: 1855 - DNA, 20 bp, Artificial Sequence
  Synthetic
ggacaagatggtgacattta

SEQ ID NO: 1856 - DNA, 20 bp, Artificial Sequence
  Synthetic
gcatcagcctacgtcacaat

SEQ ID NO: 1857 - DNA, 20 bp, Artificial Sequence
  Synthetic
gttgagaaaggaaagttcta

SEQ ID NO: 1858 - DNA, 20 bp, Artificial Sequence
  Synthetic
gggtgacagacagccagatc

SEQ ID NO: 1859 - DNA, 20 bp, Artificial Sequence
  Synthetic
gcctggaggatgaatgaatt

SEQ ID NO: 1860 - DNA, 20 bp, Artificial Sequence
  Synthetic
gggtcaagttgcagggatgg

SEQ ID NO: 1861 - DNA, 20 bp, Artificial Sequence
  Synthetic
gttcgtggctcacctctggc

SEQ ID NO: 1862 - DNA, 20 bp, Artificial Sequence
  Synthetic
gtctgaactaggaaggacag

SEQ ID NO: 1863 - DNA, 20 bp, Artificial Sequence
  Synthetic
gctctgggcttatctgcaac

SEQ ID NO: 1864 - DNA, 20 bp, Artificial Sequence
  Synthetic
gtgtctgaactaggaaggac

SEQ ID NO: 1865 - DNA, 20 bp, Artificial Sequence
  Synthetic
ggtcagattctgggtctccc

SEQ ID NO: 1866 - DNA, 20 bp, Artificial Sequence
  Synthetic
ggaggaactccgagtcagac

SEQ ID NO: 1867 - DNA, 20 bp, Artificial Sequence
  Synthetic
gtgacaagctgagttacctc

SEQ ID NO: 1868 - DNA, 20 bp, Artificial Sequence
  Synthetic
gaggcgtgagctaacgccag

SEQ ID NO: 1869 - DNA, 20 bp, Artificial Sequence
  Synthetic
gccatcttactccttatgat

SEQ ID NO: 1870 - DNA, 20 bp, Artificial Sequence
  Synthetic
ggctcaaaccggctttctca

SEQ ID NO: 1871 - DNA, 20 bp, Artificial Sequence
  Synthetic
gaacccgtggagaagctgcc

SEQ ID NO: 1872 - DNA, 20 bp, Artificial Sequence
  Synthetic
ggtctccatgaaggttcagg

SEQ ID NO: 1873 - DNA, 20 bp, Artificial Sequence
  Synthetic
gaaagctaagaaagacacca

SEQ ID NO: 1874 - DNA, 20 bp, Artificial Sequence
  Synthetic
gccagggctctccagagaag

SEQ ID NO: 1875 - DNA, 20 bp, Artificial Sequence
  Synthetic
gcaggacgaggagttggaag

SEQ ID NO: 1876 - DNA, 20 bp, Artificial Sequence
  Synthetic
gtgtgactacgggctgccca

SEQ ID NO: 1877 - DNA, 20 bp, Artificial Sequence
  Synthetic
ggtcagcgagtttctgtgtg

SEQ ID NO: 1878 - DNA, 20 bp, Artificial Sequence
  Synthetic
gcaagcaacactgcttctcc

SEQ ID NO: 1879 - DNA, 20 bp, Artificial Sequence
  Synthetic
gatagccacagtatcatatg

SEQ ID NO: 1880 - DNA, 20 bp, Artificial Sequence
  Synthetic
gggatgagaacagggaggga

SEQ ID NO: 1881 - DNA, 20 bp, Artificial Sequence
  Synthetic
gacacaagaagaatgtccca

SEQ ID NO: 1882 - DNA, 20 bp, Artificial Sequence
  Synthetic
gagtcagtgaagctcttaaa

SEQ ID NO: 1883 - DNA, 20 bp, Artificial Sequence
  Synthetic
gtgttgcttgccaaaggatc

SEQ ID NO: 1884 - DNA, 20 bp, Artificial Sequence
  Synthetic
gagtctgggaaaccctcagc

SEQ ID NO: 1885 - DNA, 20 bp, Artificial Sequence
  Synthetic
gaaccaggcttgctggtcct

SEQ ID NO: 1886 - DNA, 20 bp, Artificial Sequence
  Synthetic
ggagaaggacatgtcaggaa

SEQ ID NO: 1887 - DNA, 20 bp, Artificial Sequence
  Synthetic
gagagatgaaccaggcttgc

SEQ ID NO: 1888 - DNA, 20 bp, Artificial Sequence
  Synthetic
gggaatacagaggtgagtct

SEQ ID NO: 1889 - DNA, 20 bp, Artificial Sequence
  Synthetic
gttcttggagggaacctcca

SEQ ID NO: 1890 - DNA, 20 bp, Artificial Sequence
  Synthetic
gtccagtcacctacgtcggt

SEQ ID NO: 1891 - DNA, 20 bp, Artificial Sequence
  Synthetic
gacctgggccacgcacagta

SEQ ID NO: 1892 - DNA, 20 bp, Artificial Sequence
  Synthetic
ggcatagtgcatagtggccc

SEQ ID NO: 1893 - DNA, 20 bp, Artificial Sequence
  Synthetic
ggaaagccaccctgtggtat

SEQ ID NO: 1894 - DNA, 20 bp, Artificial Sequence
  Synthetic
gagagtgctggagaaagaca

SEQ ID NO: 1895 - DNA, 20 bp, Artificial Sequence
  Synthetic
ggcaggtgggccagattgag

SEQ ID NO: 1896 - DNA, 20 bp, Artificial Sequence
  Synthetic
gcggccagttcttcgaggat

SEQ ID NO: 1897 - DNA, 20 bp, Artificial Sequence
  Synthetic
ggtagggagaggttcaagta

SEQ ID NO: 1898 - DNA, 20 bp, Artificial Sequence
  Synthetic
gcatcggcataggtagggag

SEQ ID NO: 1899 - DNA, 20 bp, Artificial Sequence
  Synthetic
gaacagaattgtgagatcaa

SEQ ID NO: 1900 - DNA, 20 bp, Artificial Sequence
  Synthetic
gcccggctaggagggataga

SEQ ID NO: 1901 - DNA, 20 bp, Artificial Sequence
  Synthetic
gcagctgtgggtagattgtg

SEQ ID NO: 1902 - DNA, 20 bp, Artificial Sequence
  Synthetic
gaaggttatttactgagcag

SEQ ID NO: 1903 - DNA, 20 bp, Artificial Sequence
  Synthetic
gacccaggaaggagactaaa

SEQ ID NO: 1904 - DNA, 20 bp, Artificial Sequence
  Synthetic
gaaatgctatcctctgctaa

SEQ ID NO: 1905 - DNA, 20 bp, Artificial Sequence
  Synthetic
gggcgcgtcaagaatgtaag

SEQ ID NO: 1906 - DNA, 20 bp, Artificial Sequence
  Synthetic
gcttgcctgtagaaataagt

SEQ ID NO: 1907 - DNA, 20 bp, Artificial Sequence
  Synthetic
ggcctgcctttaaataagac

SEQ ID NO: 1908 - DNA, 20 bp, Artificial Sequence
  Synthetic
ggtctaggctaggctccatg

SEQ ID NO: 1909 - DNA, 20 bp, Artificial Sequence
  Synthetic
gtgtctcaaggcgggaagga

SEQ ID NO: 1910 - DNA, 20 bp, Artificial Sequence
  Synthetic
gcatctgagtcgggcagggt

SEQ ID NO: 1911 - DNA, 20 bp, Artificial Sequence
  Synthetic
gtaagggcctagggtggagg

SEQ ID NO: 1912 - DNA, 20 bp, Artificial Sequence
  Synthetic
gaaatcttcctaggccactg

SEQ ID NO: 1913 - DNA, 20 bp, Artificial Sequence
  Synthetic
gctttcttgctacgtggctg

SEQ ID NO: 1914 - DNA, 20 bp, Artificial Sequence
  Synthetic
ggttcctttcggcaccttgg

SEQ ID NO: 1915 - DNA, 20 bp, Artificial Sequence
  Synthetic
gataactgaacagggagtgg

SEQ ID NO: 1916 - DNA, 20 bp, Artificial Sequence
  Synthetic
gttcggccctctgattggac

SEQ ID NO: 1917 - DNA, 20 bp, Artificial Sequence
  Synthetic
gtatgaatactagcttctaa

SEQ ID NO: 1918 - DNA, 20 bp, Artificial Sequence
  Synthetic
gacactggtggaagtcatcc

SEQ ID NO: 1919 - DNA, 20 bp, Artificial Sequence
  Synthetic
ggcgaccagatttctctgaa

SEQ ID NO: 1920 - DNA, 20 bp, Artificial Sequence
  Synthetic
gaaagccatggacaggcagg

SEQ ID NO: 1921 - DNA, 20 bp, Artificial Sequence
  Synthetic
gcagctcatttctattcctc

SEQ ID NO: 1922 - DNA, 20 bp, Artificial Sequence
  Synthetic
ggatgatagagaaattgttg

SEQ ID NO: 1923 - DNA, 20 bp, Artificial Sequence
  Synthetic
gctcagtctgacagggatct

SEQ ID NO: 1924 - DNA, 20 bp, Artificial Sequence
  Synthetic
gaatcctatggaaactggga

SEQ ID NO: 1925 - DNA, 20 bp, Artificial Sequence
  Synthetic
gcatatattggctgtgagac

SEQ ID NO: 1926 - DNA, 20 bp, Artificial Sequence
  Synthetic
gcagggagaagagttcagag

SEQ ID NO: 1927 - DNA, 20 bp, Artificial Sequence
  Synthetic
gatggctagaaagagggctc

SEQ ID NO: 1928 - DNA, 20 bp, Artificial Sequence
  Synthetic
gagggagatggctagaaaga

SEQ ID NO: 1929 - DNA, 20 bp, Artificial Sequence
  Synthetic
gccagacgagacaggaaacc

SEQ ID NO: 1930 - DNA, 20 bp, Artificial Sequence
  Synthetic
gactctcagcaaacatcggt

SEQ ID NO: 1931 - DNA, 20 bp, Artificial Sequence
  Synthetic
gttcaacggctacatcctgt

SEQ ID NO: 1932 - DNA, 20 bp, Artificial Sequence
  Synthetic
ggatagaccactcccactta

SEQ ID NO: 1933 - DNA, 20 bp, Artificial Sequence
  Synthetic
gcagagacagaaataaaggt

SEQ ID NO: 1934 - DNA, 20 bp, Artificial Sequence
  Synthetic
gactgcttaagatttctcag

SEQ ID NO: 1935 - DNA, 20 bp, Artificial Sequence
  Synthetic
ggattcatttgtgacatctt

SEQ ID NO: 1936 - DNA, 20 bp, Artificial Sequence
  Synthetic
gcatccttcatttgagtccc

SEQ ID NO: 1937 - DNA, 20 bp, Artificial Sequence
  Synthetic
gtcacagagccttagagccc

SEQ ID NO: 1938 - DNA, 20 bp, Artificial Sequence
  Synthetic
ggcagagacagaaataaagg

SEQ ID NO: 1939 - DNA, 20 bp, Artificial Sequence
  Synthetic
gaaggaccacaccagggtgc

SEQ ID NO: 1940 - DNA, 20 bp, Artificial Sequence
  Synthetic
gccaggcacaggaaggtaac

SEQ ID NO: 1941 - DNA, 20 bp, Artificial Sequence
  Synthetic
ggaaatatttgcatgcattc

SEQ ID NO: 1942 - DNA, 20 bp, Artificial Sequence
  Synthetic
ggaacaaagcccgtagacca

SEQ ID NO: 1943 - DNA, 20 bp, Artificial Sequence
  Synthetic
gggccaaataaataatggaa

SEQ ID NO: 1944 - DNA, 20 bp, Artificial Sequence
  Synthetic
gctgcgacttcttactttcc

SEQ ID NO: 1945 - DNA, 20 bp, Artificial Sequence
  Synthetic
ggctgagggtgtgactgctg

SEQ ID NO: 1946 - DNA, 20 bp, Artificial Sequence
  Synthetic
gttgagatcatttcctcaca

SEQ ID NO: 1947 - DNA, 20 bp, Artificial Sequence
  Synthetic
ggactctaggacaggaagag

SEQ ID NO: 1948 - DNA, 20 bp, Artificial Sequence
  Synthetic
ggcatctgaaaccaggagga

SEQ ID NO: 1949 - DNA, 20 bp, Artificial Sequence
  Synthetic
gcacgtgtgcagcctgaaca

SEQ ID NO: 1950 - DNA, 20 bp, Artificial Sequence
  Synthetic
gacttaacctgactcacctg

SEQ ID NO: 1951 - DNA, 20 bp, Artificial Sequence
  Synthetic
gtaaaccgagtctcaattgc

SEQ ID NO: 1952 - DNA, 20 bp, Artificial Sequence
  Synthetic
ggaaagaggccagaggcgtt

SEQ ID NO: 1953 - DNA, 20 bp, Artificial Sequence
  Synthetic
gctgccattcctgagctgga

SEQ ID NO: 1954 - DNA, 20 bp, Artificial Sequence
  Synthetic
ggcgtttggctttggatttg

SEQ ID NO: 1955 - DNA, 20 bp, Artificial Sequence
  Synthetic
ggtggtaaccacattaaaca

SEQ ID NO: 1956 - DNA, 20 bp, Artificial Sequence
  Synthetic
gctggccaggaacaatgacg

SEQ ID NO: 1957 - DNA, 20 bp, Artificial Sequence
  Synthetic
gagggtctccttccaggcac

SEQ ID NO: 1958 - DNA, 20 bp, Artificial Sequence
  Synthetic
gaagggaagagcaagagggc

SEQ ID NO: 1959 - DNA, 20 bp, Artificial Sequence
  Synthetic
gcttaaccctttcctgcctg

SEQ ID NO: 1960 - DNA, 20 bp, Artificial Sequence
  Synthetic
gagggtgtgcaccactgtgt

SEQ ID NO: 1961 - DNA, 20 bp, Artificial Sequence
  Synthetic
ggatggacttcctacgtcac

SEQ ID NO: 1962 - DNA, 20 bp, Artificial Sequence
  Synthetic
gatctaaggatggagtagca

SEQ ID NO: 1963 - DNA, 20 bp, Artificial Sequence
  Synthetic
gcagttatgagtggaaggca

SEQ ID NO: 1964 - DNA, 20 bp, Artificial Sequence
  Synthetic
gagggttcaagacaggactc

SEQ ID NO: 1965 - DNA, 20 bp, Artificial Sequence
  Synthetic
gagaggattaggacagcgga

SEQ ID NO: 1966 - DNA, 20 bp, Artificial Sequence
  Synthetic
ggccggtccctgttgttctg

SEQ ID NO: 1967 - DNA, 20 bp, Artificial Sequence
  Synthetic
gaaagatgtatgccaagacg

SEQ ID NO: 1968 - DNA, 20 bp, Artificial Sequence
  Synthetic
gatccaaacccagcgggagc

SEQ ID NO: 1969 - DNA, 20 bp, Artificial Sequence
  Synthetic
gtaaaggagggagggattga

SEQ ID NO: 1970 - DNA, 20 bp, Artificial Sequence
  Synthetic
ggtgagttcttcaggcttga

SEQ ID NO: 1971 - DNA, 20 bp, Artificial Sequence
  Synthetic
gaatccgtgacaaagctagt

SEQ ID NO: 1972 - DNA, 20 bp, Artificial Sequence
  Synthetic
gtcacggattctgtgtgact

SEQ ID NO: 1973 - DNA, 20 bp, Artificial Sequence
  Synthetic
gtctcctgagctaagtggga

SEQ ID NO: 1974 - DNA, 20 bp, Artificial Sequence
  Synthetic
gatatctccaggtgtaggga

SEQ ID NO: 1975 - DNA, 20 bp, Artificial Sequence
  Synthetic
gagttgcaccttctccaacc

SEQ ID NO: 1976 - DNA, 20 bp, Artificial Sequence
  Synthetic
gcgggaagggagagtttggg

SEQ ID NO: 1977 - DNA, 20 bp, Artificial Sequence
  Synthetic
gtataagcagacctgggatc

SEQ ID NO: 1978 - DNA, 20 bp, Artificial Sequence
  Synthetic
gttcccaatgaagacagccc

SEQ ID NO: 1979 - DNA, 20 bp, Artificial Sequence
  Synthetic
ggagtgtgtgtacgtgactt

SEQ ID NO: 1980 - DNA, 20 bp, Artificial Sequence
  Synthetic
gctttaatccaggcctctac

SEQ ID NO: 1981 - DNA, 20 bp, Artificial Sequence
  Synthetic
gctctctgcctgtagaggcc

SEQ ID NO: 1982 - DNA, 20 bp, Artificial Sequence
  Synthetic
gagaggagcggtcttaagtc

SEQ ID NO: 1983 - DNA, 20 bp, Artificial Sequence
  Synthetic
gagcatcacctcctgctccc

SEQ ID NO: 1984 - DNA, 20 bp, Artificial Sequence
  Synthetic
gagcgcctacagaaggacat

SEQ ID NO: 1985 - DNA, 20 bp, Artificial Sequence
  Synthetic
gcttgtgatagctccagaga

SEQ ID NO: 1986 - DNA, 20 bp, Artificial Sequence
  Synthetic
gctgtcttcattgggaacaa

SEQ ID NO: 1987 - DNA, 20 bp, Artificial Sequence
  Synthetic
gtcctgagacacagtcagta

SEQ ID NO: 1988 - DNA, 20 bp, Artificial Sequence
  Synthetic
ggtaatcccaaacagtacta

SEQ ID NO: 1989 - DNA, 20 bp, Artificial Sequence
  Synthetic
gtacagataagcgctgtacc

SEQ ID NO: 1990 - DNA, 20 bp, Artificial Sequence
  Synthetic
gggctggagaataaagagtg

SEQ ID NO: 1991 - DNA, 20 bp, Artificial Sequence
  Synthetic
ggaaacgcaggcgctttata

SEQ ID NO: 1992 - DNA, 20 bp, Artificial Sequence
  Synthetic
gcgcccttggtctgttccat

SEQ ID NO: 1993 - DNA, 20 bp, Artificial Sequence
  Synthetic
gcctgagtttcccggcgact

SEQ ID NO: 1994 - DNA, 20 bp, Artificial Sequence
  Synthetic
ggatacagatgcactgcata

SEQ ID NO: 1995 - DNA, 20 bp, Artificial Sequence
  Synthetic
gtacacgcacgcaccagcct

SEQ ID NO: 1996 - DNA, 20 bp, Artificial Sequence
  Synthetic
gagtcgccgggaaactcagg

SEQ ID NO: 1997 - DNA, 20 bp, Artificial Sequence
  Synthetic
gcacggagtgtgtgtgtgtt

SEQ ID NO: 1998 - DNA, 20 bp, Artificial Sequence
  Synthetic
ggagtgacttctagtcacag

SEQ ID NO: 1999 - DNA, 20 bp, Artificial Sequence
  Synthetic
gtacgttcccgcaatgccgg

SEQ ID NO: 2000 - DNA, 20 bp, Artificial Sequence
  Synthetic
gccctgtcttctatgtcata

SEQ ID NO: 2001 - DNA, 20 bp, Artificial Sequence
  Synthetic
gccttcactttctgcttagt

SEQ ID NO: 2002 - DNA, 20 bp, Artificial Sequence
  Synthetic
gcttagttggtacccagata

SEQ ID NO: 2003 - DNA, 20 bp, Artificial Sequence
  Synthetic
gggtcaagaatcaggatgag

SEQ ID NO: 2004 - DNA, 20 bp, Artificial Sequence
  Synthetic
gcaggaacaaggaagcttct

SEQ ID NO: 2005 - DNA, 20 bp, Artificial Sequence
  Synthetic
gcagatgcgttccagcaccc

SEQ ID NO: 2006 - DNA, 20 bp, Artificial Sequence
  Synthetic
gatcagtaggagagcagaga

SEQ ID NO: 2007 - DNA, 20 bp, Artificial Sequence
  Synthetic
gaagtagtgctggcggcaat

SEQ ID NO: 2008 - DNA, 20 bp, Artificial Sequence
  Synthetic
gaaatagttggcccaaatcc

SEQ ID NO: 2009 - DNA, 20 bp, Artificial Sequence
  Synthetic
gtttagctgcagccaatacc

SEQ ID NO: 2010 - DNA, 20 bp, Artificial Sequence
  Synthetic
gtgtgagctgattattcaaa

SEQ ID NO: 2011 - DNA, 20 bp, Artificial Sequence
  Synthetic
ggctggtcactgaatgccag

SEQ ID NO: 2012 - DNA, 20 bp, Artificial Sequence
  Synthetic
gacccatttgagtagaagga

SEQ ID NO: 2013 - DNA, 20 bp, Artificial Sequence
  Synthetic
gaattgcacagcgttaagca

SEQ ID NO: 2014 - DNA, 20 bp, Artificial Sequence
  Synthetic
ggagcacttgggtggagatg

SEQ ID NO: 2015 - DNA, 20 bp, Artificial Sequence
  Synthetic
gattattcaaatgggctgcc

SEQ ID NO: 2016 - DNA, 20 bp, Artificial Sequence
  Synthetic
gtgtggtcgaacttgttatt

SEQ ID NO: 2017 - DNA, 20 bp, Artificial Sequence
  Synthetic
gatccactctttaggataac

SEQ ID NO: 2018 - DNA, 20 bp, Artificial Sequence
  Synthetic
ggtggaggaggaggaggtga

SEQ ID NO: 2019 - DNA, 20 bp, Artificial Sequence
  Synthetic
gctcccgctctgttgctcta

SEQ ID NO: 2020 - DNA, 20 bp, Artificial Sequence
  Synthetic
ggaaggagggaggcaaacgg

SEQ ID NO: 2021 - DNA, 20 bp, Artificial Sequence
  Synthetic
gctccgtacagagtcagggt

SEQ ID NO: 2022 - DNA, 20 bp, Artificial Sequence
  Synthetic
ggaaacgtgctgttatcctt

SEQ ID NO: 2023 - DNA, 20 bp, Artificial Sequence
  Synthetic
gaagccaaagaaggcaagga

SEQ ID NO: 2024 - DNA, 20 bp, Artificial Sequence
  Synthetic
gcggatttgaggaaggaggg

SEQ ID NO: 2025 - DNA, 20 bp, Artificial Sequence
  Synthetic
gcttcgcacacggccagtct

SEQ ID NO: 2026 - DNA, 20 bp, Artificial Sequence
  Synthetic
gatagatatatttggacagc

SEQ ID NO: 2027 - DNA, 20 bp, Artificial Sequence
  Synthetic
gtatttaacctagtggcatg

SEQ ID NO: 2028 - DNA, 20 bp, Artificial Sequence
  Synthetic
gtatcttactggttgccatt

SEQ ID NO: 2029 - DNA, 20 bp, Artificial Sequence
  Synthetic
gaaagaaaccagcgctggcc

SEQ ID NO: 2030 - DNA, 20 bp, Artificial Sequence
  Synthetic
gaagcattgacccgtctctg

SEQ ID NO: 2031 - DNA, 20 bp, Artificial Sequence
  Synthetic
gattggatgggttgttcaaa

SEQ ID NO: 2032 - DNA, 20 bp, Artificial Sequence
  Synthetic
gcaatcgcggctttaagcca

SEQ ID NO: 2033 - DNA, 20 bp, Artificial Sequence
  Synthetic
ggtccaactgatttaatctt

SEQ ID NO: 2034 - DNA, 20 bp, Artificial Sequence
  Synthetic
gaagcttggtggaggtggga

SEQ ID NO: 2035 - DNA, 20 bp, Artificial Sequence
  Synthetic
ggtctgctgttccacagcaa

SEQ ID NO: 2036 - DNA, 20 bp, Artificial Sequence
  Synthetic
ggtgtatcctcttgtttctt

SEQ ID NO: 2037 - DNA, 20 bp, Artificial Sequence
  Synthetic
ggatgactagacttgagctc

SEQ ID NO: 2038 - DNA, 20 bp, Artificial Sequence
  Synthetic
gaccagtggaaatggagaag

SEQ ID NO: 2039 - DNA, 20 bp, Artificial Sequence
  Synthetic
gcctctcagctgtaaggttt

SEQ ID NO: 2040 - DNA, 20 bp, Artificial Sequence
  Synthetic
gggaagtgaaagcgaagggt

SEQ ID NO: 2041 - DNA, 20 bp, Artificial Sequence
  Synthetic
ggctgcagctgcagctcaga

SEQ ID NO: 2042 - DNA, 20 bp, Artificial Sequence
  Synthetic
ggagccagaaggttccctgc

SEQ ID NO: 2043 - DNA, 20 bp, Artificial Sequence
  Synthetic
gccaaacagcaggagccaga

SEQ ID NO: 2044 - DNA, 20 bp, Artificial Sequence
  Synthetic
gggcgtcctaggaattcctc

SEQ ID NO: 2045 - DNA, 20 bp, Artificial Sequence
  Synthetic
gacggcaaagtgattgcccg

SEQ ID NO: 2046 - DNA, 20 bp, Artificial Sequence
  Synthetic
gagtctgggagtgagtgggt

SEQ ID NO: 2047 - DNA, 20 bp, Artificial Sequence
  Synthetic
ggaaaggagaggacaaggga

SEQ ID NO: 2048 - DNA, 20 bp, Artificial Sequence
  Synthetic
gtggtgacaccacaggaatg

SEQ ID NO: 2049 - DNA, 20 bp, Artificial Sequence
  Synthetic
gagggatattcggaaaggag

SEQ ID NO: 2050 - DNA, 20 bp, Artificial Sequence
  Synthetic
gcggtattggaggatctgag

SEQ ID NO: 2051 - DNA, 20 bp, Artificial Sequence
  Synthetic
gaacgtgaagatgcagtctt

SEQ ID NO: 2052 - DNA, 20 bp, Artificial Sequence
  Synthetic
gtgtgttagtgagggaaaga

SEQ ID NO: 2053 - DNA, 20 bp, Artificial Sequence
  Synthetic
gtttccacattccagcgggc

SEQ ID NO: 2054 - DNA, 20 bp, Artificial Sequence
  Synthetic
gagtcgctgtgcgtcaaggt

SEQ ID NO: 2055 - DNA, 20 bp, Artificial Sequence
  Synthetic
gagggaaggagcacgcttga

SEQ ID NO: 2056 - DNA, 20 bp, Artificial Sequence
  Synthetic
gagtcctccaaacaatttcg

SEQ ID NO: 2057 - DNA, 20 bp, Artificial Sequence
  Synthetic
gaaagcgctgtctggaggtt

SEQ ID NO: 2058 - DNA, 20 bp, Artificial Sequence
  Synthetic
ggtttaaatttggcatacgc

SEQ ID NO: 2059 - DNA, 20 bp, Artificial Sequence
  Synthetic
ggctgggagggaaggcttag

SEQ ID NO: 2060 - DNA, 20 bp, Artificial Sequence
  Synthetic
gtccggtgtagatctgggta

SEQ ID NO: 2061 - DNA, 20 bp, Artificial Sequence
  Synthetic
gagatctggctaagagcatc

SEQ ID NO: 2062 - DNA, 20 bp, Artificial Sequence
  Synthetic
gctgggagggaaggcttagt

SEQ ID NO: 2063 - DNA, 20 bp, Artificial Sequence
  Synthetic
gtgggaatgccaaactggga

SEQ ID NO: 2064 - DNA, 20 bp, Artificial Sequence
  Synthetic
gatctagtagtctcctctga

SEQ ID NO: 2065 - DNA, 20 bp, Artificial Sequence
  Synthetic
gagaaagttcacccgcagga

SEQ ID NO: 2066 - DNA, 20 bp, Artificial Sequence
  Synthetic
gatcaatgaaggtacagaac

SEQ ID NO: 2067 - DNA, 20 bp, Artificial Sequence
  Synthetic
gattctgagagctagggacc

SEQ ID NO: 2068 - DNA, 20 bp, Artificial Sequence
  Synthetic
ggagaagaagcctgttgtgc

SEQ ID NO: 2069 - DNA, 20 bp, Artificial Sequence
  Synthetic
gctttcaggccaaggagtgg

SEQ ID NO: 2070 - DNA, 20 bp, Artificial Sequence
  Synthetic
ggtagggtgtcccagctctc

SEQ ID NO: 2071 - DNA, 20 bp, Artificial Sequence
  Synthetic
gcagacaggcgtcctaacca

SEQ ID NO: 2072 - DNA, 20 bp, Artificial Sequence
  Synthetic
gggcctgtgacaaagatgaa

SEQ ID NO: 2073 - DNA, 20 bp, Artificial Sequence
  Synthetic
gaaacagccctttaaccctt

SEQ ID NO: 2074 - DNA, 20 bp, Artificial Sequence
  Synthetic
ggagtgcacagcaggtattg

SEQ ID NO: 2075 - DNA, 20 bp, Artificial Sequence
  Synthetic
gggatgaggttaagtttctt

SEQ ID NO: 2076 - DNA, 20 bp, Artificial Sequence
  Synthetic
gtggccaaggctccagcata

SEQ ID NO: 2077 - DNA, 20 bp, Artificial Sequence
  Synthetic
gcaacactggcccagggatg

SEQ ID NO: 2078 - DNA, 20 bp, Artificial Sequence
  Synthetic
gcggtgcacaccaggaaagt

SEQ ID NO: 2079 - DNA, 20 bp, Artificial Sequence
  Synthetic
gccagaacattccacttcca

SEQ ID NO: 2080 - DNA, 20 bp, Artificial Sequence
  Synthetic
gccctattctctgggaggga

SEQ ID NO: 2081 - DNA, 20 bp, Artificial Sequence
  Synthetic
gggtgccctattctctggga

SEQ ID NO: 2082 - DNA, 20 bp, Artificial Sequence
  Synthetic
gcctaaggcggaagaactgt

SEQ ID NO: 2083 - DNA, 20 bp, Artificial Sequence
  Synthetic
gccactgtgaggcgctgttg

SEQ ID NO: 2084 - DNA, 20 bp, Artificial Sequence
  Synthetic
gactttgtccgcctcgttga

SEQ ID NO: 2085 - DNA, 20 bp, Artificial Sequence
  Synthetic
gctggaaacggagcaggcat

SEQ ID NO: 2086 - DNA, 20 bp, Artificial Sequence
  Synthetic
gttatgacgtctttgtttat

SEQ ID NO: 2087 - DNA, 20 bp, Artificial Sequence
  Synthetic
gggaaatcccagagatgctg

SEQ ID NO: 2088 - DNA, 20 bp, Artificial Sequence
  Synthetic
gggctccaagcagctctgga

SEQ ID NO: 2089 - DNA, 20 bp, Artificial Sequence
  Synthetic
gttcagggaattgtcaacaa

SEQ ID NO: 2090 - DNA, 20 bp, Artificial Sequence
  Synthetic
gcggtcttgggtaagtggag

SEQ ID NO: 2091 - DNA, 20 bp, Artificial Sequence
  Synthetic
ggcttaatatcgatttctag

SEQ ID NO: 2092 - DNA, 20 bp, Artificial Sequence
  Synthetic
gctgactagacagtcttctc

SEQ ID NO: 2093 - DNA, 20 bp, Artificial Sequence
  Synthetic
gctggcctctgacctctaca

SEQ ID NO: 2094 - DNA, 20 bp, Artificial Sequence
  Synthetic
gaacttccacagtttatgct

SEQ ID NO: 2095 - DNA, 20 bp, Artificial Sequence
  Synthetic
gtagttggtaaagacaacga

SEQ ID NO: 2096 - DNA, 20 bp, Artificial Sequence
  Synthetic
ggaaccgagtctctccagca

SEQ ID NO: 2097 - DNA, 20 bp, Artificial Sequence
  Synthetic
gagggaaggagccatttctc

SEQ ID NO: 2098 - DNA, 20 bp, Artificial Sequence
  Synthetic
gcagtgtggatgccttacca

SEQ ID NO: 2099 - DNA, 20 bp, Artificial Sequence
  Synthetic
gaaccgagtctctccagcag

SEQ ID NO: 2100 - DNA, 20 bp, Artificial Sequence
  Synthetic
gccagtacctttcctgagca

SEQ ID NO: 2101 - DNA, 20 bp, Artificial Sequence
  Synthetic
gggtaagaactggactaaag

SEQ ID NO: 2102 - DNA, 20 bp, Artificial Sequence
  Synthetic
gtctacagctgaagacgacg

SEQ ID NO: 2103 - DNA, 20 bp, Artificial Sequence
  Synthetic
ggtggaaggtacaacccaag

SEQ ID NO: 2104 - DNA, 20 bp, Artificial Sequence
  Synthetic
gaattctgcttccctctgct

SEQ ID NO: 2105 - DNA, 20 bp, Artificial Sequence
  Synthetic
gaaagcctcctcgccgcatc

SEQ ID NO: 2106 - DNA, 20 bp, Artificial Sequence
  Synthetic
gaagcagaattctggaagaa

SEQ ID NO: 2107 - DNA, 20 bp, Artificial Sequence
  Synthetic
gccgcatcagggtccttagg

SEQ ID NO: 2108 - DNA, 20 bp, Artificial Sequence
  Synthetic
gtttgctggcgcctttaagg

SEQ ID NO: 2109 - DNA, 20 bp, Artificial Sequence
  Synthetic
ggaaagagacacactgtgga

SEQ ID NO: 2110 - DNA, 20 bp, Artificial Sequence
  Synthetic
gctagcaaagactgctggag

SEQ ID NO: 2111 - DNA, 20 bp, Artificial Sequence
  Synthetic
gagcgggaactagaagcatg

SEQ ID NO: 2112 - DNA, 20 bp, Artificial Sequence
  Synthetic
gcatcctatgtagctggtca

SEQ ID NO: 2113 - DNA, 20 bp, Artificial Sequence
  Synthetic
gggatggtacttactgagac

SEQ ID NO: 2114 - DNA, 20 bp, Artificial Sequence
  Synthetic
gggctgggaaagcaaattag

SEQ ID NO: 2115 - DNA, 20 bp, Artificial Sequence
  Synthetic
gggaaagcaaattagagggc

SEQ ID NO: 2116 - DNA, 20 bp, Artificial Sequence
  Synthetic
gaggaaagcgagaaaggcta

SEQ ID NO: 2117 - DNA, 20 bp, Artificial Sequence
  Synthetic
ggacagttacacacagggaa

SEQ ID NO: 2118 - DNA, 20 bp, Artificial Sequence
  Synthetic
gactgactcagggatgaggg

SEQ ID NO: 2119 - DNA, 20 bp, Artificial Sequence
  Synthetic
gacccagagggactagacca

SEQ ID NO: 2120 - DNA, 20 bp, Artificial Sequence
  Synthetic
gcggatttcagagttaagcg

SEQ ID NO: 2121 - DNA, 20 bp, Artificial Sequence
  Synthetic
gcaagcctgcgcgtctaagt

SEQ ID NO: 2122 - DNA, 20 bp, Artificial Sequence
  Synthetic
ggacagactttagaactctg

SEQ ID NO: 2123 - DNA, 20 bp, Artificial Sequence
  Synthetic
gagcccactgaatagctacg

SEQ ID NO: 2124 - DNA, 20 bp, Artificial Sequence
  Synthetic
ggtgattagaggattcgctt

SEQ ID NO: 2125 - DNA, 20 bp, Artificial Sequence
  Synthetic
gagccacaggatcacaagaa

SEQ ID NO: 2126 - DNA, 20 bp, Artificial Sequence
  Synthetic
gggtgtgggaatgtgtggcc

SEQ ID NO: 2127 - DNA, 20 bp, Artificial Sequence
  Synthetic
ggcacatctgtgcgagggtc

SEQ ID NO: 2128 - DNA, 20 bp, Artificial Sequence
  Synthetic
gtctgtcctggagaaaggaa

SEQ ID NO: 2129 - DNA, 20 bp, Artificial Sequence
  Synthetic
gaccctcgcacagatgtgcc

SEQ ID NO: 2130 - DNA, 20 bp, Artificial Sequence
  Synthetic
ggcacggatcgctaggttgg

SEQ ID NO: 2131 - DNA, 20 bp, Artificial Sequence
  Synthetic
gggcacggatcgctaggttg

SEQ ID NO: 2132 - DNA, 20 bp, Artificial Sequence
  Synthetic
gggtctgaggaacagaggaa

SEQ ID NO: 2133 - DNA, 20 bp, Artificial Sequence
  Synthetic
gggatcagcatgaaataaat

SEQ ID NO: 2134 - DNA, 20 bp, Artificial Sequence
  Synthetic
ggagctttgtgggcagactt

SEQ ID NO: 2135 - DNA, 20 bp, Artificial Sequence
  Synthetic
ggagtaatcgagtctggcca

SEQ ID NO: 2136 - DNA, 20 bp, Artificial Sequence
  Synthetic
gctcagagagagatggccct

SEQ ID NO: 2137 - DNA, 20 bp, Artificial Sequence
  Synthetic
gcctgggaagatgggagaca

SEQ ID NO: 2138 - DNA, 20 bp, Artificial Sequence
  Synthetic
gttgacagatggtgtcagtt

SEQ ID NO: 2139 - DNA, 20 bp, Artificial Sequence
  Synthetic
gaatgcgagtctctcaaagc

SEQ ID NO: 2140 - DNA, 20 bp, Artificial Sequence
  Synthetic
gctttatgtgcagagggaag

SEQ ID NO: 2141 - DNA, 20 bp, Artificial Sequence
  Synthetic
gcccagcatttcccagggat

SEQ ID NO: 2142 - DNA, 20 bp, Artificial Sequence
  Synthetic
gattaccttcagaagacaga

SEQ ID NO: 2143 - DNA, 20 bp, Artificial Sequence
  Synthetic
gtgaaatgattcggtgtaac

SEQ ID NO: 2144 - DNA, 20 bp, Artificial Sequence
  Synthetic
gtaggaagagatccaagcag

SEQ ID NO: 2145 - DNA, 20 bp, Artificial Sequence
  Synthetic
gcgcgccacgttgtaagcag

SEQ ID NO: 2146 - DNA, 20 bp, Artificial Sequence
  Synthetic
gctagagagatctgtgagcc

SEQ ID NO: 2147 - DNA, 20 bp, Artificial Sequence
  Synthetic
ggtgccaaaggttgatttct

SEQ ID NO: 2148 - DNA, 20 bp, Artificial Sequence
  Synthetic
gctcacagatctctctagct

SEQ ID NO: 2149 - DNA, 20 bp, Artificial Sequence
  Synthetic
gtgagggtcgggtctatctg

SEQ ID NO: 2150 - DNA, 20 bp, Artificial Sequence
  Synthetic
gactttcctgtgcttcatgt

SEQ ID NO: 2151 - DNA, 20 bp, Artificial Sequence
  Synthetic
gctttaactggaaccaagga

SEQ ID NO: 2152 - DNA, 20 bp, Artificial Sequence
  Synthetic
gtcatccactgtagattgac

SEQ ID NO: 2153 - DNA, 20 bp, Artificial Sequence
  Synthetic
gtcatggtgatgggactttc

SEQ ID NO: 2154 - DNA, 20 bp, Artificial Sequence
  Synthetic
gaggttccaggtgagaaggc

SEQ ID NO: 2155 - DNA, 20 bp, Artificial Sequence
  Synthetic
ggtacagtcatgagtggagg

SEQ ID NO: 2156 - DNA, 20 bp, Artificial Sequence
  Synthetic
gcagcagtttgggtgatggt

SEQ ID NO: 2157 - DNA, 20 bp, Artificial Sequence
  Synthetic
ggagtctgctcaggacttga

SEQ ID NO: 2158 - DNA, 20 bp, Artificial Sequence
  Synthetic
gatggatttgcccgaccaac

SEQ ID NO: 2159 - DNA, 20 bp, Artificial Sequence
  Synthetic
gcttacttactttgaacctc

SEQ ID NO: 2160 - DNA, 20 bp, Artificial Sequence
  Synthetic
ggcaaatgaaagcaattctg

SEQ ID NO: 2161 - DNA, 20 bp, Artificial Sequence
  Synthetic
gagcatgtgtcagtgcctgg

SEQ ID NO: 2162 - DNA, 20 bp, Artificial Sequence
  Synthetic
ggataagccacctttaagct

SEQ ID NO: 2163 - DNA, 20 bp, Artificial Sequence
  Synthetic
gtgacctggcacaactgtcc

SEQ ID NO: 2164 - DNA, 20 bp, Artificial Sequence
  Synthetic
gaagatgatggcaccaagag

SEQ ID NO: 2165 - DNA, 20 bp, Artificial Sequence
  Synthetic
gtaaagcagagagagaggtt

SEQ ID NO: 2166 - DNA, 20 bp, Artificial Sequence
  Synthetic
gcctagctccctcagtgcca

SEQ ID NO: 2167 - DNA, 20 bp, Artificial Sequence
  Synthetic
gaaatcgtccttgctgaggg

SEQ ID NO: 2168 - DNA, 20 bp, Artificial Sequence
  Synthetic
gactcaggagaagaaagtag

SEQ ID NO: 2169 - DNA, 20 bp, Artificial Sequence
  Synthetic
gttaacgaggcagtatgaca

SEQ ID NO: 2170 - DNA, 20 bp, Artificial Sequence
  Synthetic
gtgcctaaggcaagggcatc

SEQ ID NO: 2171 - DNA, 20 bp, Artificial Sequence
  Synthetic
gagttccaagactgtttgtc

SEQ ID NO: 2172 - DNA, 20 bp, Artificial Sequence
  Synthetic
gacctgtttgtcatgtagcc

SEQ ID NO: 2173 - DNA, 20 bp, Artificial Sequence
  Synthetic
ggttacagctgtggcacaga

SEQ ID NO: 2174 - DNA, 20 bp, Artificial Sequence
  Synthetic
gcccaggctacatgacaaac

SEQ ID NO: 2175 - DNA, 20 bp, Artificial Sequence
  Synthetic
ggttggttaagtaaaggcag

SEQ ID NO: 2176 - DNA, 20 bp, Artificial Sequence
  Synthetic
gtccaatctggcctggcttc

SEQ ID NO: 2177 - DNA, 20 bp, Artificial Sequence
  Synthetic
gagagagaggctggtggctt

SEQ ID NO: 2178 - DNA, 20 bp, Artificial Sequence
  Synthetic
gagagcagagccttaggagc

SEQ ID NO: 2179 - DNA, 20 bp, Artificial Sequence
  Synthetic
ggccacttccctgcagtgct

SEQ ID NO: 2180 - DNA, 20 bp, Artificial Sequence
  Synthetic
gggaagcagggtgttcagaa

SEQ ID NO: 2181 - DNA, 20 bp, Artificial Sequence
  Synthetic
gaatgagcaaggcagagcaa

SEQ ID NO: 2182 - DNA, 20 bp, Artificial Sequence
  Synthetic
gagacttggtctgcagaatc

SEQ ID NO: 2183 - DNA, 20 bp, Artificial Sequence
  Synthetic
gggcaaagacttcaagggca

SEQ ID NO: 2184 - DNA, 20 bp, Artificial Sequence
  Synthetic
ggcagatgcagaagcaggta

SEQ ID NO: 2185 - DNA, 20 bp, Artificial Sequence
  Synthetic
ggcaactctctggaactctc

SEQ ID NO: 2186 - DNA, 20 bp, Artificial Sequence
  Synthetic
gggaggaatgcactagggta

SEQ ID NO: 2187 - DNA, 20 bp, Artificial Sequence
  Synthetic
gcttccaaccaatagttcgg

SEQ ID NO: 2188 - DNA, 20 bp, Artificial Sequence
  Synthetic
gacttggtctgcagaatccg

SEQ ID NO: 2189 - DNA, 20 bp, Artificial Sequence
  Synthetic
gctgtctggaagagaaagag

SEQ ID NO: 2190 - DNA, 20 bp, Artificial Sequence
  Synthetic
gtcagtgaaagattggatcg

SEQ ID NO: 2191 - DNA, 20 bp, Artificial Sequence
  Synthetic
gtagtgagacctgaaggacc

SEQ ID NO: 2192 - DNA, 20 bp, Artificial Sequence
  Synthetic
gatgccagcgtccacgctaa

SEQ ID NO: 2193 - DNA, 20 bp, Artificial Sequence
  Synthetic
ggaagggtagtgagacctga

SEQ ID NO: 2194 - DNA, 20 bp, Artificial Sequence
  Synthetic
gtcacttgactttagcacaa

SEQ ID NO: 2195 - DNA, 20 bp, Artificial Sequence
  Synthetic
ggtctcactccgggtccttc

SEQ ID NO: 2196 - DNA, 20 bp, Artificial Sequence
  Synthetic
gggagggaagaggctttgtt

SEQ ID NO: 2197 - DNA, 20 bp, Artificial Sequence
  Synthetic
gagaaagggagccatgcctg

SEQ ID NO: 2198 - DNA, 20 bp, Artificial Sequence
  Synthetic
ggtcctggcttgtgcgtatc

SEQ ID NO: 2199 - DNA, 20 bp, Artificial Sequence
  Synthetic
gacacagaccttccagtgct

SEQ ID NO: 2200 - DNA, 20 bp, Artificial Sequence
  Synthetic
gatgaatccaagcacccttc

SEQ ID NO: 2201 - DNA, 20 bp, Artificial Sequence
  Synthetic
ggtggagcaattgagcacac

SEQ ID NO: 2202 - DNA, 20 bp, Artificial Sequence
  Synthetic
gggaattagcatcccagtgc

SEQ ID NO: 2203 - DNA, 20 bp, Artificial Sequence
  Synthetic
gaggctggagtttaaagtcc

SEQ ID NO: 2204 - DNA, 20 bp, Artificial Sequence
  Synthetic
gcactggaaggtctgtgtct

SEQ ID NO: 2205 - DNA, 20 bp, Artificial Sequence
  Synthetic
gctgacggccaagtgtggga

SEQ ID NO: 2206 - DNA, 20 bp, Artificial Sequence
  Synthetic
gagggtgagctggcacaggt

SEQ ID NO: 2207 - DNA, 20 bp, Artificial Sequence
  Synthetic
gaggcaggatgtggagggac

SEQ ID NO: 2208 - DNA, 20 bp, Artificial Sequence
  Synthetic
gaaacacactccgaccctct

SEQ ID NO: 2209 - DNA, 20 bp, Artificial Sequence
  Synthetic
gaacagagactgcctcctca

SEQ ID NO: 2210 - DNA, 20 bp, Artificial Sequence
  Synthetic
gttgaagtcacagaggaaag

SEQ ID NO: 2211 - DNA, 20 bp, Artificial Sequence
  Synthetic
gaatctacagcggaatgtgg

SEQ ID NO: 2212 - DNA, 20 bp, Artificial Sequence
  Synthetic
ggttggacacttaaggaatc

SEQ ID NO: 2213 - DNA, 20 bp, Artificial Sequence
  Synthetic
gcaccgcccactttagtcgt

SEQ ID NO: 2214 - DNA, 20 bp, Artificial Sequence
  Synthetic
gtgggtgggtgtgtgtgtgg

SEQ ID NO: 2215 - DNA, 20 bp, Artificial Sequence
  Synthetic
gcagagcctctaacttctgc

SEQ ID NO: 2216 - DNA, 20 bp, Artificial Sequence
  Synthetic
gacttcttgctgtcctttgc

SEQ ID NO: 2217 - DNA, 20 bp, Artificial Sequence
  Synthetic
gatgagacccagggtcagct

SEQ ID NO: 2218 - DNA, 20 bp, Artificial Sequence
  Synthetic
ggtggagtggccgaactttg

SEQ ID NO: 2219 - DNA, 20 bp, Artificial Sequence
  Synthetic
gagaggtgatccaagcctct

SEQ ID NO: 2220 - DNA, 20 bp, Artificial Sequence
  Synthetic
gcatcttctccttccagcat

SEQ ID NO: 2221 - DNA, 20 bp, Artificial Sequence
  Synthetic
gcttcccactttgagatgaa

SEQ ID NO: 2222 - DNA, 20 bp, Artificial Sequence
  Synthetic
gcacaagtgtcacgcgtgga

SEQ ID NO: 2223 - DNA, 20 bp, Artificial Sequence
  Synthetic
gaagtcagcctctggccatc

SEQ ID NO: 2224 - DNA, 20 bp, Artificial Sequence
  Synthetic
gaaggagaagatgcaggtaa

SEQ ID NO: 2225 - DNA, 20 bp, Artificial Sequence
  Synthetic
gttgagtgtggagaataatg

SEQ ID NO: 2226 - DNA, 20 bp, Artificial Sequence
  Synthetic
gccttctagtacacaatggc

SEQ ID NO: 2227 - DNA, 20 bp, Artificial Sequence
  Synthetic
gccacgtaaccgcaagtcta

SEQ ID NO: 2228 - DNA, 20 bp, Artificial Sequence
  Synthetic
gtatgaagagagctgcaggg

SEQ ID NO: 2229 - DNA, 20 bp, Artificial Sequence
  Synthetic
gcaagtcacttgcaatgact

SEQ ID NO: 2230 - DNA, 20 bp, Artificial Sequence
  Synthetic
gccaaggcgttgtcacagaa

SEQ ID NO: 2231 - DNA, 20 bp, Artificial Sequence
  Synthetic
gggaagaaggtctgagcctc

SEQ ID NO: 2232 - DNA, 20 bp, Artificial Sequence
  Synthetic
gaagagagctgcagggtgga

SEQ ID NO: 2233 - DNA, 20 bp, Artificial Sequence
  Synthetic
gcaagctttgaccctgagga

SEQ ID NO: 2234 - DNA, 20 bp, Artificial Sequence
  Synthetic
gacatgggagggaagtcaca

SEQ ID NO: 2235 - DNA, 20 bp, Artificial Sequence
  Synthetic
gcaggcatgcccacagacat

SEQ ID NO: 2236 - DNA, 20 bp, Artificial Sequence
  Synthetic
gttaaccatcgtgtacagat

SEQ ID NO: 2237 - DNA, 20 bp, Artificial Sequence
  Synthetic
gggttctgggaagcagcaca

SEQ ID NO: 2238 - DNA, 20 bp, Artificial Sequence
  Synthetic
gagggaagtcacatggattt

SEQ ID NO: 2239 - DNA, 20 bp, Artificial Sequence
  Synthetic
gtgcatgtcccaacaggcct

SEQ ID NO: 2240 - DNA, 20 bp, Artificial Sequence
  Synthetic
gctacacactgccacacata

SEQ ID NO: 2241 - DNA, 20 bp, Artificial Sequence
  Synthetic
ggagacacaagcctgagtac

SEQ ID NO: 2242 - DNA, 20 bp, Artificial Sequence
  Synthetic
gagtcaattcaccgttctct

SEQ ID NO: 2243 - DNA, 20 bp, Artificial Sequence
  Synthetic
ggacatgctgtgtatggatg

SEQ ID NO: 2244 - DNA, 20 bp, Artificial Sequence
  Synthetic
ggagattcttgtataccaag

SEQ ID NO: 2245 - DNA, 20 bp, Artificial Sequence
  Synthetic
gtattgcctacactgtattg

SEQ ID NO: 2246 - DNA, 20 bp, Artificial Sequence
  Synthetic
ggtctgggtgtggtcagtca

SEQ ID NO: 2247 - DNA, 20 bp, Artificial Sequence
  Synthetic
gcttcatttggttcctgatg

SEQ ID NO: 2248 - DNA, 20 bp, Artificial Sequence
  Synthetic
gctttgttgagcaagcagac

SEQ ID NO: 2249 - DNA, 20 bp, Artificial Sequence
  Synthetic
ggtgtggtcagtcacggcag

SEQ ID NO: 2250 - DNA, 20 bp, Artificial Sequence
  Synthetic
gctccacttagttcaaagtc

SEQ ID NO: 2251 - DNA, 20 bp, Artificial Sequence
  Synthetic
ggcaacagtgatgctatgta

SEQ ID NO: 2252 - DNA, 20 bp, Artificial Sequence
  Synthetic
gacaaaggtgcccaggcttg

SEQ ID NO: 2253 - DNA, 20 bp, Artificial Sequence
  Synthetic
gcccggaaggacctatggga

SEQ ID NO: 2254 - DNA, 20 bp, Artificial Sequence
  Synthetic
gccacggtcgcatgttgaag

SEQ ID NO: 2255 - DNA, 20 bp, Artificial Sequence
  Synthetic
gcagtgcatgacccagccag

SEQ ID NO: 2256 - DNA, 20 bp, Artificial Sequence
  Synthetic
gaccggtttacgtattactc

SEQ ID NO: 2257 - DNA, 20 bp, Artificial Sequence
  Synthetic
gagttggacagctccagaga

SEQ ID NO: 2258 - DNA, 20 bp, Artificial Sequence
  Synthetic
gtgcagtgcatgacccagcc

SEQ ID NO: 2259 - DNA, 20 bp, Artificial Sequence
  Synthetic
gaagcaacgggctctttctg

SEQ ID NO: 2260 - DNA, 20 bp, Artificial Sequence
  Synthetic
gaatatctagcagtggtgtc

SEQ ID NO: 2261 - DNA, 20 bp, Artificial Sequence
  Synthetic
gatcaatcctgttagggaac

SEQ ID NO: 2262 - DNA, 20 bp, Artificial Sequence
  Synthetic
gcctgaacttaagggttccc

SEQ ID NO: 2263 - DNA, 20 bp, Artificial Sequence
  Synthetic
ggttcaggatgagtggaggc

SEQ ID NO: 2264 - DNA, 20 bp, Artificial Sequence
  Synthetic
gaagacttcactcatcttgg

SEQ ID NO: 2265 - DNA, 20 bp, Artificial Sequence
  Synthetic
gaggcggcagtaggttggtg

SEQ ID NO: 2266 - DNA, 20 bp, Artificial Sequence
  Synthetic
gcaccttaaacggttcatag

SEQ ID NO: 2267 - DNA, 20 bp, Artificial Sequence
  Synthetic
ggtgaagacccgtcgctctg

SEQ ID NO: 2268 - DNA, 20 bp, Artificial Sequence
  Synthetic
gtcctcggcacctctggttc

SEQ ID NO: 2269 - DNA, 20 bp, Artificial Sequence
  Synthetic
gcaggtgtgcacaggtaggg

SEQ ID NO: 2270 - DNA, 20 bp, Artificial Sequence
  Synthetic
gacgtcactgagcatcttac

SEQ ID NO: 2271 - DNA, 20 bp, Artificial Sequence
  Synthetic
gcgaaggccaaattcacagc

SEQ ID NO: 2272 - DNA, 20 bp, Artificial Sequence
  Synthetic
gtctggagcccagagactgg

SEQ ID NO: 2273 - DNA, 20 bp, Artificial Sequence
  Synthetic
gggaggagggaaaggaggta

SEQ ID NO: 2274 - DNA, 20 bp, Artificial Sequence
  Synthetic
gtgcacacacctggaccaca

SEQ ID NO: 2275 - DNA, 20 bp, Artificial Sequence
  Synthetic
gcgtcgaactagcttggtgc

SEQ ID NO: 2276 - DNA, 20 bp, Artificial Sequence
  Synthetic
ggcaatatagatggtgatgt

SEQ ID NO: 2277 - DNA, 20 bp, Artificial Sequence
  Synthetic
gcattctgaccctgaaggta

SEQ ID NO: 2278 - DNA, 20 bp, Artificial Sequence
  Synthetic
gaagaggagcgagaggcgtc

SEQ ID NO: 2279 - DNA, 20 bp, Artificial Sequence
  Synthetic
gaggcacggatcgtgggata

SEQ ID NO: 2280 - DNA, 20 bp, Artificial Sequence
  Synthetic
gacagcgggaggactagagg

SEQ ID NO: 2281 - DNA, 20 bp, Artificial Sequence
  Synthetic
gaagtagcaagttacagaag

SEQ ID NO: 2282 - DNA, 20 bp, Artificial Sequence
  Synthetic
gggattcagttctggagttg

SEQ ID NO: 2283 - DNA, 20 bp, Artificial Sequence
  Synthetic
gtttcctctgtcagctatgc

SEQ ID NO: 2284 - DNA, 20 bp, Artificial Sequence
  Synthetic
gtagtcttcgagaacgacca

SEQ ID NO: 2285 - DNA, 20 bp, Artificial Sequence
  Synthetic
ggtggaactttaatgattag

SEQ ID NO: 2286 - DNA, 20 bp, Artificial Sequence
  Synthetic
ggtaaacagagacgtctggc

SEQ ID NO: 2287 - DNA, 20 bp, Artificial Sequence
  Synthetic
ggtcactcttgagagggtca

SEQ ID NO: 2288 - DNA, 20 bp, Artificial Sequence
  Synthetic
gtctctgtttaccactcgct

SEQ ID NO: 2289 - DNA, 20 bp, Artificial Sequence
  Synthetic
gaaggcccagtgtatgaaga

SEQ ID NO: 2290 - DNA, 20 bp, Artificial Sequence
  Synthetic
gggaaggaatcacaccacca

SEQ ID NO: 2291 - DNA, 20 bp, Artificial Sequence
  Synthetic
gcagtgagggtttctaaccg

SEQ ID NO: 2292 - DNA, 20 bp, Artificial Sequence
  Synthetic
ggtggcctctggatccgcaa

SEQ ID NO: 2293 - DNA, 20 bp, Artificial Sequence
  Synthetic
gacagtcttctgaagcaggc

SEQ ID NO: 2294 - DNA, 20 bp, Artificial Sequence
  Synthetic
gtaatttgtctgtagaaccc

SEQ ID NO: 2295 - DNA, 20 bp, Artificial Sequence
  Synthetic
gcaattaagaattcactcca

SEQ ID NO: 2296 - DNA, 20 bp, Artificial Sequence
  Synthetic
gaaggctaggaatcttcttc

SEQ ID NO: 2297 - DNA, 20 bp, Artificial Sequence
  Synthetic
gctttggtgttgatgacagt

SEQ ID NO: 2298 - DNA, 20 bp, Artificial Sequence
  Synthetic
gtagagtagtagggtctcag

SEQ ID NO: 2299 - DNA, 20 bp, Artificial Sequence
  Synthetic
gagctgctggcaaatgaaac

SEQ ID NO: 2300 - DNA, 20 bp, Artificial Sequence
  Synthetic
gaaactctaactgcttgctt

SEQ ID NO: 2301 - DNA, 20 bp, Artificial Sequence
  Synthetic
gtagagaagaatgactacag

SEQ ID NO: 2302 - DNA, 20 bp, Artificial Sequence
  Synthetic
gaccacataccttgccacgg

SEQ ID NO: 2303 - DNA, 20 bp, Artificial Sequence
  Synthetic
gggtcttgtgacttgaatct

SEQ ID NO: 2304 - DNA, 20 bp, Artificial Sequence
  Synthetic
gaggaccctgtcagaatgaa

SEQ ID NO: 2305 - DNA, 20 bp, Artificial Sequence
  Synthetic
gtagcctagcagggttggtg

SEQ ID NO: 2306 - DNA, 20 bp, Artificial Sequence
  Synthetic
ggcgcacacacaggagagaa

SEQ ID NO: 2307 - DNA, 20 bp, Artificial Sequence
  Synthetic
gaccctgtcagaatgaaagg

SEQ ID NO: 2308 - DNA, 20 bp, Artificial Sequence
  Synthetic
gagagaggcgacttgagcag

SEQ ID NO: 2309 - DNA, 20 bp, Artificial Sequence
  Synthetic
gggtctgtggaagctgagac

SEQ ID NO: 2310 - DNA, 20 bp, Artificial Sequence
  Synthetic
gagcagggaccattaacttt

SEQ ID NO: 2311 - DNA, 20 bp, Artificial Sequence
  Synthetic
gctaaggaaatactgaggtt

SEQ ID NO: 2312 - DNA, 20 bp, Artificial Sequence
  Synthetic
gagaagacagacccatgctg

SEQ ID NO: 2313 - DNA, 20 bp, Artificial Sequence
  Synthetic
gggatgaggtcctcttactt

SEQ ID NO: 2314 - DNA, 20 bp, Artificial Sequence
  Synthetic
ggcagagaggtattgagggt

SEQ ID NO: 2315 - DNA, 20 bp, Artificial Sequence
  Synthetic
gccattgacgtcatggcggc

SEQ ID NO: 2316 - DNA, 20 bp, Artificial Sequence
  Synthetic
ggcaacaaggaggaagagaa

SEQ ID NO: 2317 - DNA, 20 bp, Artificial Sequence
  Synthetic
gtagcctttctttccacaga

SEQ ID NO: 2318 - DNA, 20 bp, Artificial Sequence
  Synthetic
gcccaagtgtacagggagca

SEQ ID NO: 2319 - DNA, 20 bp, Artificial Sequence
  Synthetic
ggaggactaaattgggtagc

SEQ ID NO: 2320 - DNA, 20 bp, Artificial Sequence
  Synthetic
ggatgaactgggtaaggact

SEQ ID NO: 2321 - DNA, 20 bp, Artificial Sequence
  Synthetic
gagcttgtgtttagcacttc

SEQ ID NO: 2322 - DNA, 20 bp, Artificial Sequence
  Synthetic
ggaccacgtggaccaaactt

SEQ ID NO: 2323 - DNA, 20 bp, Artificial Sequence
  Synthetic
gtagcaatgagagactgact

SEQ ID NO: 2324 - DNA, 20 bp, Artificial Sequence
  Synthetic
gttccttccttgctcccaca

SEQ ID NO: 2325 - DNA, 20 bp, Artificial Sequence
  Synthetic
gagttaataaagcctcccat

SEQ ID NO: 2326 - DNA, 20 bp, Artificial Sequence
  Synthetic
gcctcaattaggacaagatg

SEQ ID NO: 2327 - DNA, 20 bp, Artificial Sequence
  Synthetic
gactgagtaggcctgagtag

SEQ ID NO: 2328 - DNA, 20 bp, Artificial Sequence
  Synthetic
gtgggccaggagctgaaagg

SEQ ID NO: 2329 - DNA, 20 bp, Artificial Sequence
  Synthetic
gagaattcattcaccttcta

SEQ ID NO: 2330 - DNA, 20 bp, Artificial Sequence
  Synthetic
ggccatagagaggaagtaag

SEQ ID NO: 2331 - DNA, 20 bp, Artificial Sequence
  Synthetic
ggccgagggactggttgcat

SEQ ID NO: 2332 - DNA, 20 bp, Artificial Sequence
  Synthetic
gacaaagcattgatttggcc

SEQ ID NO: 2333 - DNA, 20 bp, Artificial Sequence
  Synthetic
gatggattgataagtgcctg

SEQ ID NO: 2334 - DNA, 20 bp, Artificial Sequence
  Synthetic
gcctaaccaagatcaaggta

SEQ ID NO: 2335 - DNA, 20 bp, Artificial Sequence
  Synthetic
gcacgggtgtcaaacaggaa

SEQ ID NO: 2336 - DNA, 20 bp, Artificial Sequence
  Synthetic
gaagccggctaagaaacaag

SEQ ID NO: 2337 - DNA, 20 bp, Artificial Sequence
  Synthetic
gaagctggcgtggtaggcat

SEQ ID NO: 2338 - DNA, 20 bp, Artificial Sequence
  Synthetic
gctgccctgagcctgagctt

SEQ ID NO: 2339 - DNA, 20 bp, Artificial Sequence
  Synthetic
gttctgtcctcagggcagac

SEQ ID NO: 2340 - DNA, 20 bp, Artificial Sequence
  Synthetic
gtactgggagttctgtgaac

SEQ ID NO: 2341 - DNA, 20 bp, Artificial Sequence
  Synthetic
gtaccagcaccaatacctag

SEQ ID NO: 2342 - DNA, 20 bp, Artificial Sequence
  Synthetic
gcctgaatagtatagcccgg

SEQ ID NO: 2343 - DNA, 20 bp, Artificial Sequence
  Synthetic
gaaggaaagagagagagaga

SEQ ID NO: 2344 - DNA, 20 bp, Artificial Sequence
  Synthetic
gagagtgggagacacagcag

SEQ ID NO: 2345 - DNA, 20 bp, Artificial Sequence
  Synthetic
gtagactttggagggctaca

SEQ ID NO: 2346 - DNA, 20 bp, Artificial Sequence
  Synthetic
gatagttgtgtggagatggg

SEQ ID NO: 2347 - DNA, 20 bp, Artificial Sequence
  Synthetic
gagttgactgatgtgatgct

SEQ ID NO: 2348 - DNA, 20 bp, Artificial Sequence
  Synthetic
ggtagaacagctcctgggtc

SEQ ID NO: 2349 - DNA, 20 bp, Artificial Sequence
  Synthetic
ggagaattcacccttcaaga

SEQ ID NO: 2350 - DNA, 20 bp, Artificial Sequence
  Synthetic
gttcctctctggctgcctcg

SEQ ID NO: 2351 - DNA, 20 bp, Artificial Sequence
  Synthetic
gtgtgtttgaaacaaagcct

SEQ ID NO: 2352 - DNA, 20 bp, Artificial Sequence
  Synthetic
gcttgagtgagttctcctcc

SEQ ID NO: 2353 - DNA, 20 bp, Artificial Sequence
  Synthetic
gacctcttccttaaagcata

SEQ ID NO: 2354 - DNA, 20 bp, Artificial Sequence
  Synthetic
gctggctattaattcctctt

SEQ ID NO: 2355 - DNA, 20 bp, Artificial Sequence
  Synthetic
gagttaacttacagtgaagc

SEQ ID NO: 2356 - DNA, 20 bp, Artificial Sequence
  Synthetic
gtagatcaaagggtgcttgg

SEQ ID NO: 2357 - DNA, 20 bp, Artificial Sequence
  Synthetic
gcttcgctagattgtaattt

SEQ ID NO: 2358 - DNA, 20 bp, Artificial Sequence
  Synthetic
gaggatttgtggccagcagc

SEQ ID NO: 2359 - DNA, 20 bp, Artificial Sequence
  Synthetic
gcgctctcccatagtgcctc

SEQ ID NO: 2360 - DNA, 20 bp, Artificial Sequence
  Synthetic
gccatctcctccacaaagcc

SEQ ID NO: 2361 - DNA, 20 bp, Artificial Sequence
  Synthetic
ggactcatttcagccagaat

SEQ ID NO: 2362 - DNA, 20 bp, Artificial Sequence
  Synthetic
gcatgtccttgcagggctta

SEQ ID NO: 2363 - DNA, 20 bp, Artificial Sequence
  Synthetic
gagtgtggctttgaatgtta

SEQ ID NO: 2364 - DNA, 20 bp, Artificial Sequence
  Synthetic
gatggcggagtcttagctga

SEQ ID NO: 2365 - DNA, 20 bp, Artificial Sequence
  Synthetic
gcctcctgggactgagcttc

SEQ ID NO: 2366 - DNA, 20 bp, Artificial Sequence
  Synthetic
gggttgtgtggcctttatca

SEQ ID NO: 2367 - DNA, 20 bp, Artificial Sequence
  Synthetic
ggatatcatagaagtgcggt

SEQ ID NO: 2368 - DNA, 20 bp, Artificial Sequence
  Synthetic
gctgtgctacagtgcttacg

SEQ ID NO: 2369 - DNA, 20 bp, Artificial Sequence
  Synthetic
gagtacgctaaattagacgt

SEQ ID NO: 2370 - DNA, 20 bp, Artificial Sequence
  Synthetic
gcgatctgttcatgatcaca

SEQ ID NO: 2371 - DNA, 20 bp, Artificial Sequence
  Synthetic
gacagaagccaaacaggagg

SEQ ID NO: 2372 - DNA, 20 bp, Artificial Sequence
  Synthetic
ggactcagtgcaaggtgact

SEQ ID NO: 2373 - DNA, 20 bp, Artificial Sequence
  Synthetic
ggtttcttcacgaggagaga

SEQ ID NO: 2374 - DNA, 20 bp, Artificial Sequence
  Synthetic
gagacaaccgagaataacct

SEQ ID NO: 2375 - DNA, 20 bp, Artificial Sequence
  Synthetic
ggccagtaggctgatgtcta

SEQ ID NO: 2376 - DNA, 20 bp, Artificial Sequence
  Synthetic
gcaaagggagaggactgcta

SEQ ID NO: 2377 - DNA, 20 bp, Artificial Sequence
  Synthetic
gttcattccttcagcagtgc

SEQ ID NO: 2378 - DNA, 20 bp, Artificial Sequence
  Synthetic
ggtgaaggccatccagtcga

SEQ ID NO: 2379 - DNA, 20 bp, Artificial Sequence
  Synthetic
gtacccggaatcgctggttg

SEQ ID NO: 2380 - DNA, 20 bp, Artificial Sequence
  Synthetic
ggcatggagaagcagtagtt

SEQ ID NO: 2381 - DNA, 20 bp, Artificial Sequence
  Synthetic
gttaggtttggttggttggt

SEQ ID NO: 2382 - DNA, 20 bp, Artificial Sequence
  Synthetic
gatttaacttaccgtggtcc

SEQ ID NO: 2383 - DNA, 20 bp, Artificial Sequence
  Synthetic
gtgtatctgaagtttgttac

SEQ ID NO: 2384 - DNA, 20 bp, Artificial Sequence
  Synthetic
gagggctaaatataatccca

SEQ ID NO: 2385 - DNA, 20 bp, Artificial Sequence
  Synthetic
gtcagtcggaccacttaaca

SEQ ID NO: 2386 - DNA, 20 bp, Artificial Sequence
  Synthetic
gtgatcttatcccaatcctc

SEQ ID NO: 2387 - DNA, 20 bp, Artificial Sequence
  Synthetic
gccctggaaatccgtaggct

SEQ ID NO: 2388 - DNA, 20 bp, Artificial Sequence
  Synthetic
gcaagggtgagaattggagg

SEQ ID NO: 2389 - DNA, 20 bp, Artificial Sequence
  Synthetic
gtgccattggtgtgaggatg

SEQ ID NO: 2390 - DNA, 20 bp, Artificial Sequence
  Synthetic
gcctagcctacggatttcca

SEQ ID NO: 2391 - DNA, 20 bp, Artificial Sequence
  Synthetic
gtggagggacaatggctggt

SEQ ID NO: 2392 - DNA, 20 bp, Artificial Sequence
  Synthetic
gatcctgatactaatagcag

SEQ ID NO: 2393 - DNA, 20 bp, Artificial Sequence
  Synthetic
gcagtatgaggcccagaact

SEQ ID NO: 2394 - DNA, 20 bp, Artificial Sequence
  Synthetic
gcgtctgatgcgggtctgct

SEQ ID NO: 2395 - DNA, 20 bp, Artificial Sequence
  Synthetic
gttctttgaatttctcagag

SEQ ID NO: 2396 - DNA, 20 bp, Artificial Sequence
  Synthetic
gaggttcctaagataccttc

SEQ ID NO: 2397 - DNA, 20 bp, Artificial Sequence
  Synthetic
gaataaccgttctaatgagg

SEQ ID NO: 2398 - DNA, 20 bp, Artificial Sequence
  Synthetic
gaccaccaggctgaactgcc

SEQ ID NO: 2399 - DNA, 20 bp, Artificial Sequence
  Synthetic
gctgaataaccgttctaatg

SEQ ID NO: 2400 - DNA, 20 bp, Artificial Sequence
  Synthetic
gtcgtccgtagcagtggagg

SEQ ID NO: 2401 - DNA, 20 bp, Artificial Sequence
  Synthetic
ggagtcagttggatttgggc

SEQ ID NO: 2402 - DNA, 20 bp, Artificial Sequence
  Synthetic
gtccgtaattgggtaactgg

SEQ ID NO: 2403 - DNA, 20 bp, Artificial Sequence
  Synthetic
ggtgcagggtgaactcagaa

SEQ ID NO: 2404 - DNA, 20 bp, Artificial Sequence
  Synthetic
ggacgcccgcgttattgtta

SEQ ID NO: 2405 - DNA, 20 bp, Artificial Sequence
  Synthetic
gggcttcctcttcccttggc

SEQ ID NO: 2406 - DNA, 20 bp, Artificial Sequence
  Synthetic
gtagcaaagccgattcattc

SEQ ID NO: 2407 - DNA, 20 bp, Artificial Sequence
  Synthetic
ggcactggatccagcctgta

SEQ ID NO: 2408 - DNA, 20 bp, Artificial Sequence
  Synthetic
ggtctgaggtagtttagggt

SEQ ID NO: 2409 - DNA, 20 bp, Artificial Sequence
  Synthetic
gcttggctttagagggttac

SEQ ID NO: 2410 - DNA, 20 bp, Artificial Sequence
  Synthetic
gtctctgggacagggtctgg

SEQ ID NO: 2411 - DNA, 20 bp, Artificial Sequence
  Synthetic
gggacacgatcctcagcaca

SEQ ID NO: 2412 - DNA, 20 bp, Artificial Sequence
  Synthetic
gttgcagtttccttgtgctg

SEQ ID NO: 2413 - DNA, 20 bp, Artificial Sequence
  Synthetic
gattctgactggcattgttt

SEQ ID NO: 2414 - DNA, 20 bp, Artificial Sequence
  Synthetic
gcagtcagtcctcgaactgc

SEQ ID NO: 2415 - DNA, 20 bp, Artificial Sequence
  Synthetic
gtctctaggcactgacctta

SEQ ID NO: 2416 - DNA, 20 bp, Artificial Sequence
  Synthetic
gtttccaatacaagattaga

SEQ ID NO: 2417 - DNA, 20 bp, Artificial Sequence
  Synthetic
gaaagctacagacttaaggc

SEQ ID NO: 2418 - DNA, 20 bp, Artificial Sequence
  Synthetic
gggaggccaaagagaggagg

SEQ ID NO: 2419 - DNA, 20 bp, Artificial Sequence
  Synthetic
gaaggaaagcactcagtgcc

SEQ ID NO: 2420 - DNA, 20 bp, Artificial Sequence
  Synthetic
gcacagaggtcgcctagttc

SEQ ID NO: 2421 - DNA, 20 bp, Artificial Sequence
  Synthetic
gcaacgctgaggatcagact

SEQ ID NO: 2422 - DNA, 20 bp, Artificial Sequence
  Synthetic
gtgccatcccgagccttctc

SEQ ID NO: 2423 - DNA, 20 bp, Artificial Sequence
  Synthetic
gatggagctagaaggaccta

SEQ ID NO: 2424 - DNA, 20 bp, Artificial Sequence
  Synthetic
gtcagtgcccaggtctagac

SEQ ID NO: 2425 - DNA, 20 bp, Artificial Sequence
  Synthetic
gggagcctcagccagtcttt

SEQ ID NO: 2426 - DNA, 20 bp, Artificial Sequence
  Synthetic
gtcctccaacttggccactc

SEQ ID NO: 2427 - DNA, 20 bp, Artificial Sequence
  Synthetic
gcattgaccagtgggcagca

SEQ ID NO: 2428 - DNA, 20 bp, Artificial Sequence
  Synthetic
ggattaaactcagttcagat

SEQ ID NO: 2429 - DNA, 20 bp, Artificial Sequence
  Synthetic
gggtgctgcagacagatacg

SEQ ID NO: 2430 - DNA, 20 bp, Artificial Sequence
  Synthetic
ggaccgactagaagagagaa

SEQ ID NO: 2431 - DNA, 20 bp, Artificial Sequence
  Synthetic
gggagctcggaatagacgtg

SEQ ID NO: 2432 - DNA, 20 bp, Artificial Sequence
  Synthetic
gggaccgactagaagagaga

SEQ ID NO: 2433 - DNA, 20 bp, Artificial Sequence
  Synthetic
gaaggtggcacaccaaccta

SEQ ID NO: 2434 - DNA, 20 bp, Artificial Sequence
  Synthetic
gataacgcgttgagaaggag

SEQ ID NO: 2435 - DNA, 20 bp, Artificial Sequence
  Synthetic
gtatatcactgctgctgcct

SEQ ID NO: 2436 - DNA, 20 bp, Artificial Sequence
  Synthetic
gctaaaggacaccaagggag

SEQ ID NO: 2437 - DNA, 20 bp, Artificial Sequence
  Synthetic
gaacggtttatagacctact

SEQ ID NO: 2438 - DNA, 20 bp, Artificial Sequence
  Synthetic
gttacagcgctggatgatta

SEQ ID NO: 2439 - DNA, 20 bp, Artificial Sequence
  Synthetic
ggcgaggtagggaatacaca

SEQ ID NO: 2440 - DNA, 20 bp, Artificial Sequence
  Synthetic
gagaagggaaatgacttact

SEQ ID NO: 2441 - DNA, 20 bp, Artificial Sequence
  Synthetic
gtcagttactagcaactgcg

SEQ ID NO: 2442 - DNA, 20 bp, Artificial Sequence
  Synthetic
gacctgagcatcccgaaaca

SEQ ID NO: 2443 - DNA, 20 bp, Artificial Sequence
  Synthetic
gcttcctctctcaaacacag

SEQ ID NO: 2444 - DNA, 20 bp, Artificial Sequence
  Synthetic
gattgatgaggccggacccg

SEQ ID NO: 2445 - DNA, 20 bp, Artificial Sequence
  Synthetic
ggactcggttctctaagctc

SEQ ID NO: 2446 - DNA, 20 bp, Artificial Sequence
  Synthetic
gtagctagtatcatgtgttg

SEQ ID NO: 2447 - DNA, 20 bp, Artificial Sequence
  Synthetic
gaatacctgcccaatcagaa

SEQ ID NO: 2448 - DNA, 20 bp, Artificial Sequence
  Synthetic
gacctcactgtaaatggagg

SEQ ID NO: 2449 - DNA, 20 bp, Artificial Sequence
  Synthetic
gaggacagagctgggctgaa

SEQ ID NO: 2450 - DNA, 20 bp, Artificial Sequence
  Synthetic
ggacagtcaaggcggaatgg

SEQ ID NO: 2451 - DNA, 20 bp, Artificial Sequence
  Synthetic
gctttgtgaaagtttgcggc

SEQ ID NO: 2452 - DNA, 20 bp, Artificial Sequence
  Synthetic
gagccagggagatagagtga

SEQ ID NO: 2453 - DNA, 20 bp, Artificial Sequence
  Synthetic
gattgcggcgaaaggaaagt

SEQ ID NO: 2454 - DNA, 20 bp, Artificial Sequence
  Synthetic
gcctctcatgaggcctccac

SEQ ID NO: 2455 - DNA, 20 bp, Artificial Sequence
  Synthetic
gaagcttcggtctgagcaag

SEQ ID NO: 2456 - DNA, 20 bp, Artificial Sequence
  Synthetic
ggctggcggtgaaagggaag

SEQ ID NO: 2457 - DNA, 20 bp, Artificial Sequence
  Synthetic
gagcagggatcgctcacgga

SEQ ID NO: 2458 - DNA, 20 bp, Artificial Sequence
  Synthetic
gtattattattacctggagg

SEQ ID NO: 2459 - DNA, 20 bp, Artificial Sequence
  Synthetic
gaaaggcactggccagcagg

SEQ ID NO: 2460 - DNA, 20 bp, Artificial Sequence
  Synthetic
gttgcggcacacactgtccc

SEQ ID NO: 2461 - DNA, 20 bp, Artificial Sequence
  Synthetic
gttatttcccaactatggcc

SEQ ID NO: 2462 - DNA, 20 bp, Artificial Sequence
  Synthetic
gcggctgaacttccctggtg

SEQ ID NO: 2463 - DNA, 20 bp, Artificial Sequence
  Synthetic
gttatgaatgccacagagag

SEQ ID NO: 2464 - DNA, 20 bp, Artificial Sequence
  Synthetic
gagcttcagactcttggact

SEQ ID NO: 2465 - DNA, 20 bp, Artificial Sequence
  Synthetic
ggtaaggtcagctactccac

SEQ ID NO: 2466 - DNA, 20 bp, Artificial Sequence
  Synthetic
gatgaggcatggcagaactg

SEQ ID NO: 2467 - DNA, 20 bp, Artificial Sequence
  Synthetic
ggaatcccaggtagtctgct

SEQ ID NO: 2468 - DNA, 20 bp, Artificial Sequence
  Synthetic
gctttcagccagggacaggt

SEQ ID NO: 2469 - DNA, 20 bp, Artificial Sequence
  Synthetic
ggagtgtctctgcaaattca

SEQ ID NO: 2470 - DNA, 20 bp, Artificial Sequence
  Synthetic
gtcacccatagcatgcctga

SEQ ID NO: 2471 - DNA, 20 bp, Artificial Sequence
  Synthetic
gtctaaaggtgagactggaa

SEQ ID NO: 2472 - DNA, 20 bp, Artificial Sequence
  Synthetic
gagatggctttcagtgtttc

SEQ ID NO: 2473 - DNA, 20 bp, Artificial Sequence
  Synthetic
gtcactcttagactcagcgg

SEQ ID NO: 2474 - DNA, 20 bp, Artificial Sequence
  Synthetic
gcaggtcactgttagaggag

SEQ ID NO: 2475 - DNA, 20 bp, Artificial Sequence
  Synthetic
gcaaatctgaaggttgggac

SEQ ID NO: 2476 - DNA, 20 bp, Artificial Sequence
  Synthetic
ggttgaggctctggaagcaa

SEQ ID NO: 2477 - DNA, 20 bp, Artificial Sequence
  Synthetic
gctaaggctgacaatggaat

SEQ ID NO: 2478 - DNA, 20 bp, Artificial Sequence
  Synthetic
gctggtgcgctttacagcca

SEQ ID NO: 2479 - DNA, 20 bp, Artificial Sequence
  Synthetic
gtttccaacttggtctgttt

SEQ ID NO: 2480 - DNA, 20 bp, Artificial Sequence
  Synthetic
gaagttaagcagtaggcagt

SEQ ID NO: 2481 - DNA, 20 bp, Artificial Sequence
  Synthetic
ggtttccaacttggtctgtt

SEQ ID NO: 2482 - DNA, 20 bp, Artificial Sequence
  Synthetic
gtgacccaaacagaccaagt

SEQ ID NO: 2483 - DNA, 20 bp, Artificial Sequence
  Synthetic
gaaatgagatcctggaggac

SEQ ID NO: 2484 - DNA, 20 bp, Artificial Sequence
  Synthetic
gtgagcagtttaagtgctgc

SEQ ID NO: 2485 - DNA, 20 bp, Artificial Sequence
  Synthetic
gcgacgaacagaagcgaaag

SEQ ID NO: 2486 - DNA, 20 bp, Artificial Sequence
  Synthetic
gcagaaagaaacctgcgcct

SEQ ID NO: 2487 - DNA, 20 bp, Artificial Sequence
  Synthetic
gggagcataggaggaaggca

SEQ ID NO: 2488 - DNA, 20 bp, Artificial Sequence
  Synthetic
gcataggaggaaggcaggga

SEQ ID NO: 2489 - DNA, 20 bp, Artificial Sequence
  Synthetic
gaaggcagggaagggagaag

SEQ ID NO: 2490 - DNA, 20 bp, Artificial Sequence
  Synthetic
ggactatgtgctgcagtggc

SEQ ID NO: 2491 - DNA, 20 bp, Artificial Sequence
  Synthetic
gacgaacagaagcgaaagag

SEQ ID NO: 2492 - DNA, 20 bp, Artificial Sequence
  Synthetic
gtttctcctgggacaagtgt

SEQ ID NO: 2493 - DNA, 20 bp, Artificial Sequence
  Synthetic
gagcatggaactttggaaca

SEQ ID NO: 2494 - DNA, 20 bp, Artificial Sequence
  Synthetic
ggtttgggtcagggctgtat

SEQ ID NO: 2495 - DNA, 20 bp, Artificial Sequence
  Synthetic
ggactggaccaggagttctc

SEQ ID NO: 2496 - DNA, 20 bp, Artificial Sequence
  Synthetic
gatggatgcctccagagatg

SEQ ID NO: 2497 - DNA, 20 bp, Artificial Sequence
  Synthetic
gtttgaggcctttctgctga

SEQ ID NO: 2498 - DNA, 20 bp, Artificial Sequence
  Synthetic
gattgaatacccaagtacca

SEQ ID NO: 2499 - DNA, 20 bp, Artificial Sequence
  Synthetic
gtgtagcacaaccagttcaa

SEQ ID NO: 2500 - DNA, 20 bp, Artificial Sequence
  Synthetic
gaaatgccctgcgctggcct

SEQ ID NO: 2501 - DNA, 20 bp, Artificial Sequence
  Synthetic
gaacatggacccagatgtgg

SEQ ID NO: 2502 - DNA, 20 bp, Artificial Sequence
  Synthetic
gctttagacaaggaaccggt

SEQ ID NO: 2503 - DNA, 20 bp, Artificial Sequence
  Synthetic
gtcacagtagaaacagataa

SEQ ID NO: 2504 - DNA, 20 bp, Artificial Sequence
  Synthetic
gtgcgacctatggaacatga

SEQ ID NO: 2505 - DNA, 20 bp, Artificial Sequence
  Synthetic
gtatagggtccctcaaggga

SEQ ID NO: 2506 - DNA, 20 bp, Artificial Sequence
  Synthetic
gtggtccagggctggaaact

SEQ ID NO: 2507 - DNA, 20 bp, Artificial Sequence
  Synthetic
ggcagtatagggtccctcaa

SEQ ID NO: 2508 - DNA, 20 bp, Artificial Sequence
  Synthetic
ggtgactggacacagagaga

SEQ ID NO: 2509 - DNA, 20 bp, Artificial Sequence
  Synthetic
ggatatacgagggaagtgag

SEQ ID NO: 2510 - DNA, 20 bp, Artificial Sequence
  Synthetic
gatatacgagggaagtgagc

SEQ ID NO: 2511 - DNA, 20 bp, Artificial Sequence
  Synthetic
gggtggatagaagctagaga

SEQ ID NO: 2512 - DNA, 20 bp, Artificial Sequence
  Synthetic
ggtttgtttacatgtattgg

SEQ ID NO: 2513 - DNA, 20 bp, Artificial Sequence
  Synthetic
ggtaacaagaaaggaagaat

SEQ ID NO: 2514 - DNA, 20 bp, Artificial Sequence
  Synthetic
gatccaatcagtgagtaaca

SEQ ID NO: 2515 - DNA, 20 bp, Artificial Sequence
  Synthetic
gggtttgtttacatgtattg

SEQ ID NO: 2516 - DNA, 20 bp, Artificial Sequence
  Synthetic
gaaggagctttctctaaggc

SEQ ID NO: 2517 - DNA, 20 bp, Artificial Sequence
  Synthetic
gtccactccaagaagcaagc

SEQ ID NO: 2518 - DNA, 20 bp, Artificial Sequence
  Synthetic
gaacaaccagcggagggctg

SEQ ID NO: 2519 - DNA, 20 bp, Artificial Sequence
  Synthetic
gctacggcgcacagaggatc

SEQ ID NO: 2520 - DNA, 20 bp, Artificial Sequence
  Synthetic
gtagctggaactttctggta

SEQ ID NO: 2521 - DNA, 20 bp, Artificial Sequence
  Synthetic
ggcctggatgtgtctgtgtg

SEQ ID NO: 2522 - DNA, 20 bp, Artificial Sequence
  Synthetic
gaaacatccttcactcatct

SEQ ID NO: 2523 - DNA, 20 bp, Artificial Sequence
  Synthetic
gatacattgtttctggcatt

SEQ ID NO: 2524 - DNA, 20 bp, Artificial Sequence
  Synthetic
gttatctcttaactcagtag

SEQ ID NO: 2525 - DNA, 20 bp, Artificial Sequence
  Synthetic
ggaagtttcaggcttggcct

SEQ ID NO: 2526 - DNA, 20 bp, Artificial Sequence
  Synthetic
gagaggtgggcaactcagat

SEQ ID NO: 2527 - DNA, 20 bp, Artificial Sequence
  Synthetic
gttctgatttggttcaaccg

SEQ ID NO: 2528 - DNA, 20 bp, Artificial Sequence
  Synthetic
gttctgatagcgtggtggga

SEQ ID NO: 2529 - DNA, 20 bp, Artificial Sequence
  Synthetic
gaaacaagaggaattcttga

SEQ ID NO: 2530 - DNA, 20 bp, Artificial Sequence
  Synthetic
gtgaacatggtttacagaaa

SEQ ID NO: 2531 - DNA, 20 bp, Artificial Sequence
  Synthetic
ggaatgggtacaggagaacg

SEQ ID NO: 2532 - DNA, 20 bp, Artificial Sequence
  Synthetic
gcctgaactctccattcaat

SEQ ID NO: 2533 - DNA, 20 bp, Artificial Sequence
  Synthetic
ggcctgggttcagatgacaa

SEQ ID NO: 2534 - DNA, 20 bp, Artificial Sequence
  Synthetic
ggcagcagggtctcaactgt

SEQ ID NO: 2535 - DNA, 20 bp, Artificial Sequence
  Synthetic
gaagacactggcgtgggagt

SEQ ID NO: 2536 - DNA, 20 bp, Artificial Sequence
  Synthetic
gtctgctacagcaggtagcc

SEQ ID NO: 2537 - DNA, 20 bp, Artificial Sequence
  Synthetic
gtgtgtttctgcaaccggcc

SEQ ID NO: 2538 - DNA, 20 bp, Artificial Sequence
  Synthetic
gtgcaggcgatgagctgtta

SEQ ID NO: 2539 - DNA, 20 bp, Artificial Sequence
  Synthetic
gggtccacactttagaattg

SEQ ID NO: 2540 - DNA, 20 bp, Artificial Sequence
  Synthetic
gtaaatgagtttgttgctgt

SEQ ID NO: 2541 - DNA, 20 bp, Artificial Sequence
  Synthetic
gtcctggatctggactgggc

SEQ ID NO: 2542 - DNA, 20 bp, Artificial Sequence
  Synthetic
gataatgtcgcagtgctgcc

SEQ ID NO: 2543 - DNA, 20 bp, Artificial Sequence
  Synthetic
ggataatgtcgcagtgctgc

SEQ ID NO: 2544 - DNA, 20 bp, Artificial Sequence
  Synthetic
gcacatcggtagtgtgaaac

SEQ ID NO: 2545 - DNA, 20 bp, Artificial Sequence
  Synthetic
gtagttcagcacgtgttcct

SEQ ID NO: 2546 - DNA, 20 bp, Artificial Sequence
  Synthetic
gtgagatactgcactagggc

SEQ ID NO: 2547 - DNA, 20 bp, Artificial Sequence
  Synthetic
ggccttgtgcttatttcacc

SEQ ID NO: 2548 - DNA, 20 bp, Artificial Sequence
  Synthetic
gcctaccttcgcaccagacc

SEQ ID NO: 2549 - DNA, 20 bp, Artificial Sequence
  Synthetic
ggtcctggatctggactggg

SEQ ID NO: 2550 - DNA, 20 bp, Artificial Sequence
  Synthetic
gctaaagttccaagcatcac

SEQ ID NO: 2551 - DNA, 20 bp, Artificial Sequence
  Synthetic
ggtaactggcatgaagctga

SEQ ID NO: 2552 - DNA, 20 bp, Artificial Sequence
  Synthetic
gaccactggagtgtacaatg

SEQ ID NO: 2553 - DNA, 20 bp, Artificial Sequence
  Synthetic
gctggaataaattccatgtg

SEQ ID NO: 2554 - DNA, 20 bp, Artificial Sequence
  Synthetic
ggacctgttgtcaactctca

SEQ ID NO: 2555 - DNA, 20 bp, Artificial Sequence
  Synthetic
gaagctgatggccaaaggta

SEQ ID NO: 2556 - DNA, 20 bp, Artificial Sequence
  Synthetic
ggtacagtacgaaggccagg

SEQ ID NO: 2557 - DNA, 20 bp, Artificial Sequence
  Synthetic
gtcaagagggagacactggc

SEQ ID NO: 2558 - DNA, 20 bp, Artificial Sequence
  Synthetic
ggcaagctctctgaggtaac

SEQ ID NO: 2559 - DNA, 20 bp, Artificial Sequence
  Synthetic
ggagatgaagagcagagaga

SEQ ID NO: 2560 - DNA, 20 bp, Artificial Sequence
  Synthetic
gtgactgaagtactatatag

SEQ ID NO: 2561 - DNA, 20 bp, Artificial Sequence
  Synthetic
ggcctacaaagtcatcatga

SEQ ID NO: 2562 - DNA, 20 bp, Artificial Sequence
  Synthetic
ggaaggccacagtctttata

SEQ ID NO: 2563 - DNA, 20 bp, Artificial Sequence
  Synthetic
ggccacagtctttataagga

SEQ ID NO: 2564 - DNA, 20 bp, Artificial Sequence
  Synthetic
gtcagctcgaaggagcacat

SEQ ID NO: 2565 - DNA, 20 bp, Artificial Sequence
  Synthetic
ggcagtgaatggagcttgta

SEQ ID NO: 2566 - DNA, 20 bp, Artificial Sequence
  Synthetic
gtggagtcctctctgaggct

SEQ ID NO: 2567 - DNA, 20 bp, Artificial Sequence
  Synthetic
ggtcagccactgggttcagc

SEQ ID NO: 2568 - DNA, 20 bp, Artificial Sequence
  Synthetic
gaaagcctaggtcagccact

SEQ ID NO: 2569 - DNA, 20 bp, Artificial Sequence
  Synthetic
gtgtgaggagggaagtaggt

SEQ ID NO: 2570 - DNA, 20 bp, Artificial Sequence
  Synthetic
gatgtcctctgtaaaggatg

SEQ ID NO: 2571 - DNA, 20 bp, Artificial Sequence
  Synthetic
ggcaatgtggtcaggccttg

SEQ ID NO: 2572 - DNA, 20 bp, Artificial Sequence
  Synthetic
gtggtggaactcaggtggtc

SEQ ID NO: 2573 - DNA, 20 bp, Artificial Sequence
  Synthetic
ggtgggtaagtgctctgaca

SEQ ID NO: 2574 - DNA, 20 bp, Artificial Sequence
  Synthetic
gaacctatcggcacccacgc

SEQ ID NO: 2575 - DNA, 20 bp, Artificial Sequence
  Synthetic
gtgaacagcctcttccttct

SEQ ID NO: 2576 - DNA, 20 bp, Artificial Sequence
  Synthetic
gtttgccaggtggcaatgtt

SEQ ID NO: 2577 - DNA, 20 bp, Artificial Sequence
  Synthetic
gttaggagctagggagagtc

SEQ ID NO: 2578 - DNA, 20 bp, Artificial Sequence
  Synthetic
gcgcagaactaggcagtgcg

SEQ ID NO: 2579 - DNA, 20 bp, Artificial Sequence
  Synthetic
gccactcaatatgttgagaa

SEQ ID NO: 2580 - DNA, 20 bp, Artificial Sequence
  Synthetic
gggtccgggagcttctttct

SEQ ID NO: 2581 - DNA, 20 bp, Artificial Sequence
  Synthetic
gatagagaccggcttcagtt

SEQ ID NO: 2582 - DNA, 20 bp, Artificial Sequence
  Synthetic
ggagagatgccaagaggagg

SEQ ID NO: 2583 - DNA, 20 bp, Artificial Sequence
  Synthetic
gccaagtatttgttctcagt

SEQ ID NO: 2584 - DNA, 20 bp, Artificial Sequence
  Synthetic
gcagccattctgtaaccatg

SEQ ID NO: 2585 - DNA, 20 bp, Artificial Sequence
  Synthetic
gagggaatgagggaagccag

SEQ ID NO: 2586 - DNA, 20 bp, Artificial Sequence
  Synthetic
ggagggaatgagggaagcca

SEQ ID NO: 2587 - DNA, 20 bp, Artificial Sequence
  Synthetic
gccaggctctgtgcacttgg

SEQ ID NO: 2588 - DNA, 20 bp, Artificial Sequence
  Synthetic
gaagcccatagagtcctcac

SEQ ID NO: 2589 - DNA, 20 bp, Artificial Sequence
  Synthetic
gcaccatgtcatcttcctac

SEQ ID NO: 2590 - DNA, 20 bp, Artificial Sequence
  Synthetic
ggacttggtaaagtgggaga

SEQ ID NO: 2591 - DNA, 20 bp, Artificial Sequence
  Synthetic
gggattagctctctgaggac

SEQ ID NO: 2592 - DNA, 20 bp, Artificial Sequence
  Synthetic
gggattagcacgcgcgaacg

SEQ ID NO: 2593 - DNA, 20 bp, Artificial Sequence
  Synthetic
gagcaattagaacgggaatt

SEQ ID NO: 2594 - DNA, 20 bp, Artificial Sequence
  Synthetic
gggagtgagagccgaattcg

SEQ ID NO: 2595 - DNA, 20 bp, Artificial Sequence
  Synthetic
gttgccagcgccttctcttc

SEQ ID NO: 2596 - DNA, 20 bp, Artificial Sequence
  Synthetic
ggaacgcagaggcagaaggc

SEQ ID NO: 2597 - DNA, 20 bp, Artificial Sequence
  Synthetic
gaagctgtgtacacagagcg

SEQ ID NO: 2598 - DNA, 20 bp, Artificial Sequence
  Synthetic
gagagaagagactccacagg

SEQ ID NO: 2599 - DNA, 20 bp, Artificial Sequence
  Synthetic
gatcgccagcgcaaagccaa

SEQ ID NO: 2600 - DNA, 20 bp, Artificial Sequence
  Synthetic
gtaacagaaagaaagggacc

SEQ ID NO: 2601 - DNA, 20 bp, Artificial Sequence
  Synthetic
ggaagaagtaacagaaagaa

SEQ ID NO: 2602 - DNA, 20 bp, Artificial Sequence
  Synthetic
gagtgcaccggcgtgtctag

SEQ ID NO: 2603 - DNA, 20 bp, Artificial Sequence
  Synthetic
gccgaataaatccttccacg

SEQ ID NO: 2604 - DNA, 20 bp, Artificial Sequence
  Synthetic
gagggagaagacagatatag

SEQ ID NO: 2605 - DNA, 20 bp, Artificial Sequence
  Synthetic
gagctctaattgccaggact

SEQ ID NO: 2606 - DNA, 20 bp, Artificial Sequence
  Synthetic
gtggtcacagagatggaaag

SEQ ID NO: 2607 - DNA, 20 bp, Artificial Sequence
  Synthetic
gggcagggaacagcagttgg

SEQ ID NO: 2608 - DNA, 20 bp, Artificial Sequence
  Synthetic
gagagtgatggagggagagg

SEQ ID NO: 2609 - DNA, 20 bp, Artificial Sequence
  Synthetic
gcctaccttcctccctcgct

SEQ ID NO: 2610 - DNA, 20 bp, Artificial Sequence
  Synthetic
gagagtaggttggtcggagc

SEQ ID NO: 2611 - DNA, 20 bp, Artificial Sequence
  Synthetic
gctggttagaaagatgcaca

SEQ ID NO: 2612 - DNA, 20 bp, Artificial Sequence
  Synthetic
ggtaggttatctacagtcct

SEQ ID NO: 2613 - DNA, 20 bp, Artificial Sequence
  Synthetic
gcgtgaaaggcttcagtgtg

SEQ ID NO: 2614 - DNA, 20 bp, Artificial Sequence
  Synthetic
ggttggtatcagtctccacc

SEQ ID NO: 2615 - DNA, 20 bp, Artificial Sequence
  Synthetic
gactgcagtgtagggaaacc

SEQ ID NO: 2616 - DNA, 20 bp, Artificial Sequence
  Synthetic
gcagctataggtactgcaga

SEQ ID NO: 2617 - DNA, 20 bp, Artificial Sequence
  Synthetic
gcaagaggtgccaggaagtg

SEQ ID NO: 2618 - DNA, 20 bp, Artificial Sequence
  Synthetic
gtttaccagccgtgaagggt

SEQ ID NO: 2619 - DNA, 20 bp, Artificial Sequence
  Synthetic
gagccaaagtataacagaga

SEQ ID NO: 2620 - DNA, 20 bp, Artificial Sequence
  Synthetic
gtctatatacaaaggtacca

SEQ ID NO: 2621 - DNA, 20 bp, Artificial Sequence
  Synthetic
ggtagctgtcagttactcca

SEQ ID NO: 2622 - DNA, 20 bp, Artificial Sequence
  Synthetic
gaaacagatcacgtatggtg

SEQ ID NO: 2623 - DNA, 20 bp, Artificial Sequence
  Synthetic
gtcctgacgtagtcgtgcgc

SEQ ID NO: 2624 - DNA, 20 bp, Artificial Sequence
  Synthetic
gtttgaaagaggctctgaaa

SEQ ID NO: 2625 - DNA, 20 bp, Artificial Sequence
  Synthetic
gtgtaaagatcagggaaagc

SEQ ID NO: 2626 - DNA, 20 bp, Artificial Sequence
  Synthetic
gcaggtggatgggcttggtg

SEQ ID NO: 2627 - DNA, 20 bp, Artificial Sequence
  Synthetic
gcatcacacactatcatatg

SEQ ID NO: 2628 - DNA, 20 bp, Artificial Sequence
  Synthetic
gcagtaaggtattggaagaa

SEQ ID NO: 2629 - DNA, 20 bp, Artificial Sequence
  Synthetic
gaaccgtgcgtttacagcaa

SEQ ID NO: 2630 - DNA, 20 bp, Artificial Sequence
  Synthetic
ggtggaagcaagaaggcacg

SEQ ID NO: 2631 - DNA, 20 bp, Artificial Sequence
  Synthetic
gcccagtatgtaaagatctt

SEQ ID NO: 2632 - DNA, 20 bp, Artificial Sequence
  Synthetic
gatgacaggtggaagcaaga

SEQ ID NO: 2633 - DNA, 20 bp, Artificial Sequence
  Synthetic
gttcaggatagctgaataat

SEQ ID NO: 2634 - DNA, 20 bp, Artificial Sequence
  Synthetic
gttcttccgctgggagggac

SEQ ID NO: 2635 - DNA, 20 bp, Artificial Sequence
  Synthetic
gccttcgggcagtagattaa

SEQ ID NO: 2636 - DNA, 20 bp, Artificial Sequence
  Synthetic
gccagcgtttgttaggaggg

SEQ ID NO: 2637 - DNA, 20 bp, Artificial Sequence
  Synthetic
gcctcacttccttcgttctc

SEQ ID NO: 2638 - DNA, 20 bp, Artificial Sequence
  Synthetic
ggtaagttgagaccgaagaa

SEQ ID NO: 2639 - DNA, 20 bp, Artificial Sequence
  Synthetic
ggcgtgatcgtcacgtgacg

SEQ ID NO: 2640 - DNA, 20 bp, Artificial Sequence
  Synthetic
gccaggcttgctctttgctt

SEQ ID NO: 2641 - DNA, 20 bp, Artificial Sequence
  Synthetic
gttctcttgaacacaaggaa

SEQ ID NO: 2642 - DNA, 20 bp, Artificial Sequence
  Synthetic
gacagatcacctcccacatg

SEQ ID NO: 2643 - DNA, 20 bp, Artificial Sequence
  Synthetic
gagggcaactacgtatggtg

SEQ ID NO: 2644 - DNA, 20 bp, Artificial Sequence
  Synthetic
gactgccggtacttccggtg

SEQ ID NO: 2645 - DNA, 20 bp, Artificial Sequence
  Synthetic
gttcaccaatatttctgctg

SEQ ID NO: 2646 - DNA, 20 bp, Artificial Sequence
  Synthetic
gtgtagacaagtgtgagacc

SEQ ID NO: 2647 - DNA, 20 bp, Artificial Sequence
  Synthetic
gggaggtgatctgtcctgcc

SEQ ID NO: 2648 - DNA, 20 bp, Artificial Sequence
  Synthetic
gctgccagaagagggagcta

SEQ ID NO: 2649 - DNA, 20 bp, Artificial Sequence
  Synthetic
ggcctgctggagaaggaagg

SEQ ID NO: 2650 - DNA, 20 bp, Artificial Sequence
  Synthetic
gttcatgccgcaaggctgtc

SEQ ID NO: 2651 - DNA, 20 bp, Artificial Sequence
  Synthetic
gggttcagaactacaactcc

SEQ ID NO: 2652 - DNA, 20 bp, Artificial Sequence
  Synthetic
gtggcctgctggagaaggaa

SEQ ID NO: 2653 - DNA, 20 bp, Artificial Sequence
  Synthetic
gtttactttctttgtagctg

SEQ ID NO: 2654 - DNA, 20 bp, Artificial Sequence
  Synthetic
gtaaacttaagaccctcctc

SEQ ID NO: 2655 - DNA, 20 bp, Artificial Sequence
  Synthetic
gagggcgcccgaatattcgg

SEQ ID NO: 2656 - DNA, 20 bp, Artificial Sequence
  Synthetic
ggcggacataagcggtggga

SEQ ID NO: 2657 - DNA, 20 bp, Artificial Sequence
  Synthetic
ggacaggcaacggatgggag

SEQ ID NO: 2658 - DNA, 20 bp, Artificial Sequence
  Synthetic
gtcgcctgatttgcagaggg

SEQ ID NO: 2659 - DNA, 20 bp, Artificial Sequence
  Synthetic
gggatcagaaacaaggccat

SEQ ID NO: 2660 - DNA, 20 bp, Artificial Sequence
  Synthetic
gtagctggcagagaggctat

SEQ ID NO: 2661 - DNA, 20 bp, Artificial Sequence
  Synthetic
ggacaggatcagtagaggga

SEQ ID NO: 2662 - DNA, 20 bp, Artificial Sequence
  Synthetic
ggctaggcctttgctgggat

SEQ ID NO: 2663 - DNA, 20 bp, Artificial Sequence
  Synthetic
gtgtccaaggtcagaaggga

SEQ ID NO: 2664 - DNA, 20 bp, Artificial Sequence
  Synthetic
gatgagggatgatggagatg

SEQ ID NO: 2665 - DNA, 20 bp, Artificial Sequence
  Synthetic
gtagagggagggagggaagg

SEQ ID NO: 2666 - DNA, 20 bp, Artificial Sequence
  Synthetic
gggacaggatcagtagaggg

SEQ ID NO: 2667 - DNA, 20 bp, Artificial Sequence
  Synthetic
gtagtatacaggaggtcaga

SEQ ID NO: 2668 - DNA, 20 bp, Artificial Sequence
  Synthetic
gatctagaaggagaccaggt

SEQ ID NO: 2669 - DNA, 20 bp, Artificial Sequence
  Synthetic
ggtaaagcaatgatttaccg

SEQ ID NO: 2670 - DNA, 20 bp, Artificial Sequence
  Synthetic
ggtgggtcaagtcttggcgt

SEQ ID NO: 2671 - DNA, 20 bp, Artificial Sequence
  Synthetic
gcagagctatttgacaaagt

SEQ ID NO: 2672 - DNA, 20 bp, Artificial Sequence
  Synthetic
gtgtgagggacaaagcgctg

SEQ ID NO: 2673 - DNA, 20 bp, Artificial Sequence
  Synthetic
gtgttatggagccaaccaca

SEQ ID NO: 2674 - DNA, 20 bp, Artificial Sequence
  Synthetic
gcctgagtctcccagtgtga

SEQ ID NO: 2675 - DNA, 20 bp, Artificial Sequence
  Synthetic
ggagactcaggcagccactg

SEQ ID NO: 2676 - DNA, 20 bp, Artificial Sequence
  Synthetic
gctaaggcgcaaccaaagga

SEQ ID NO: 2677 - DNA, 20 bp, Artificial Sequence
  Synthetic
gtgggtcaagtcttggcgta

SEQ ID NO: 2678 - DNA, 20 bp, Artificial Sequence
  Synthetic
gaggtggaagtgggagggaa

SEQ ID NO: 2679 - DNA, 20 bp, Artificial Sequence
  Synthetic
gtaacttaggagactgaagc

SEQ ID NO: 2680 - DNA, 20 bp, Artificial Sequence
  Synthetic
gttgtgcaagagattgtgag

SEQ ID NO: 2681 - DNA, 20 bp, Artificial Sequence
  Synthetic
gtgtaagacaattaccaggc

SEQ ID NO: 2682 - DNA, 20 bp, Artificial Sequence
  Synthetic
gttcagtacagggagtgagc

SEQ ID NO: 2683 - DNA, 20 bp, Artificial Sequence
  Synthetic
gaagtgggagggaaagggag

SEQ ID NO: 2684 - DNA, 20 bp, Artificial Sequence
  Synthetic
gtgagtgtccattgtccttg

SEQ ID NO: 2685 - DNA, 20 bp, Artificial Sequence
  Synthetic
gtgatctgggatctcaggca

SEQ ID NO: 2686 - DNA, 20 bp, Artificial Sequence
  Synthetic
gggcactgaccagtttgttc

SEQ ID NO: 2687 - DNA, 20 bp, Artificial Sequence
  Synthetic
gtgggagcctgaaggccatt

SEQ ID NO: 2688 - DNA, 20 bp, Artificial Sequence
  Synthetic
gccaggtaaacttgctgctt

SEQ ID NO: 2689 - DNA, 20 bp, Artificial Sequence
  Synthetic
gcttgtacagcccaagagtg

SEQ ID NO: 2690 - DNA, 20 bp, Artificial Sequence
  Synthetic
ggctgtacaagcaggccctc

SEQ ID NO: 2691 - DNA, 20 bp, Artificial Sequence
  Synthetic
gtctggaaggccacatcaga

SEQ ID NO: 2692 - DNA, 20 bp, Artificial Sequence
  Synthetic
gtagctggacctagtcttgc

SEQ ID NO: 2693 - DNA, 20 bp, Artificial Sequence
  Synthetic
ggacctgaggaggcaagcag

SEQ ID NO: 2694 - DNA, 20 bp, Artificial Sequence
  Synthetic
gtaccctgggagcaagaaga

SEQ ID NO: 2695 - DNA, 20 bp, Artificial Sequence
  Synthetic
gaagaaggtccctgtgtaat

SEQ ID NO: 2696 - DNA, 20 bp, Artificial Sequence
  Synthetic
gtgctgtcagtgaggagtga

SEQ ID NO: 2697 - DNA, 20 bp, Artificial Sequence
  Synthetic
gtgattatgagggaactaac

SEQ ID NO: 2698 - DNA, 20 bp, Artificial Sequence
  Synthetic
gttgcatcatcaaagatttg

SEQ ID NO: 2699 - DNA, 20 bp, Artificial Sequence
  Synthetic
gtatctgaaagttgtacact

SEQ ID NO: 2700 - DNA, 20 bp, Artificial Sequence
  Synthetic
ggtgctgaaatacccaacca

SEQ ID NO: 2701 - DNA, 20 bp, Artificial Sequence
  Synthetic
gctttctcttctactttgtt

SEQ ID NO: 2702 - DNA, 20 bp, Artificial Sequence
  Synthetic
ggcctagagcgtccttggtt

SEQ ID NO: 2703 - DNA, 20 bp, Artificial Sequence
  Synthetic
gttggcggcgtattgagtca

SEQ ID NO: 2704 - DNA, 20 bp, Artificial Sequence
  Synthetic
gccaagtgccatgtactgta

SEQ ID NO: 2705 - DNA, 20 bp, Artificial Sequence
  Synthetic
ggctgtgtctcaactaattc

SEQ ID NO: 2706 - DNA, 20 bp, Artificial Sequence
  Synthetic
gttggacacagtttcacaag

SEQ ID NO: 2707 - DNA, 20 bp, Artificial Sequence
  Synthetic
ggaagaagactagcatgagt

SEQ ID NO: 2708 - DNA, 20 bp, Artificial Sequence
  Synthetic
gggaagaagactagcatgag

SEQ ID NO: 2709 - DNA, 20 bp, Artificial Sequence
  Synthetic
gagtaattctaagtctcttg

SEQ ID NO: 2710 - DNA, 20 bp, Artificial Sequence
  Synthetic
ggttgggtcagggaccacag

SEQ ID NO: 2711 - DNA, 20 bp, Artificial Sequence
  Synthetic
gtgtttattacgagcaggta

SEQ ID NO: 2712 - DNA, 20 bp, Artificial Sequence
  Synthetic
gataaagtagacaaagcacg

SEQ ID NO: 2713 - DNA, 20 bp, Artificial Sequence
  Synthetic
ggagtaattctaagtctctt

SEQ ID NO: 2714 - DNA, 20 bp, Artificial Sequence
  Synthetic
ggtagcgggtgtgtgtgtgg

SEQ ID NO: 2715 - DNA, 20 bp, Artificial Sequence
  Synthetic
gcacttatctgctaaatctg

SEQ ID NO: 2716 - DNA, 20 bp, Artificial Sequence
  Synthetic
gcaatcacctgtgaattaca

SEQ ID NO: 2717 - DNA, 20 bp, Artificial Sequence
  Synthetic
ggaagaggcagccctactac

SEQ ID NO: 2718 - DNA, 20 bp, Artificial Sequence
  Synthetic
ggacccagtttgagcacact

SEQ ID NO: 2719 - DNA, 20 bp, Artificial Sequence
  Synthetic
gttgtacacttactttgttc

SEQ ID NO: 2720 - DNA, 20 bp, Artificial Sequence
  Synthetic
gaatatggcaaagtgaaaga

SEQ ID NO: 2721 - DNA, 20 bp, Artificial Sequence
  Synthetic
gtagtagggctgcctcttcc

SEQ ID NO: 2722 - DNA, 20 bp, Artificial Sequence
  Synthetic
gaaagcaaagtacaaattgt

SEQ ID NO: 2723 - DNA, 20 bp, Artificial Sequence
  Synthetic
gggagagcttctggagacgg

SEQ ID NO: 2724 - DNA, 20 bp, Artificial Sequence
  Synthetic
gctgtgagatgcaggacttc

SEQ ID NO: 2725 - DNA, 20 bp, Artificial Sequence
  Synthetic
ggatgtccggacaaataaag

SEQ ID NO: 2726 - DNA, 20 bp, Artificial Sequence
  Synthetic
gttagacagtgagactgggt

SEQ ID NO: 2727 - DNA, 20 bp, Artificial Sequence
  Synthetic
gcagcacctaggaagctccg

SEQ ID NO: 2728 - DNA, 20 bp, Artificial Sequence
  Synthetic
gtaaatcacccggagatcca

SEQ ID NO: 2729 - DNA, 20 bp, Artificial Sequence
  Synthetic
gtatattcactcgcacacaa

SEQ ID NO: 2730 - DNA, 20 bp, Artificial Sequence
  Synthetic
gtgcctggagggtgtggaat

SEQ ID NO: 2731 - DNA, 20 bp, Artificial Sequence
  Synthetic
ggtatattcactcgcacaca

SEQ ID NO: 2732 - DNA, 20 bp, Artificial Sequence
  Synthetic
gaagttgatcctcttactgt

SEQ ID NO: 2733 - DNA, 20 bp, Artificial Sequence
  Synthetic
ggctttctggacaatgcttg

SEQ ID NO: 2734 - DNA, 20 bp, Artificial Sequence
  Synthetic
gttctataactgaggacatc

SEQ ID NO: 2735 - DNA, 20 bp, Artificial Sequence
  Synthetic
gagaggaagggagctaccga

SEQ ID NO: 2736 - DNA, 20 bp, Artificial Sequence
  Synthetic
gcagtttgacatcagccggc

SEQ ID NO: 2737 - DNA, 20 bp, Artificial Sequence
  Synthetic
gctgatgtcaaactgcagct

SEQ ID NO: 2738 - DNA, 20 bp, Artificial Sequence
  Synthetic
gatatatatagaggccgcca

SEQ ID NO: 2739 - DNA, 20 bp, Artificial Sequence
  Synthetic
gagaggaatgaatgggctag

SEQ ID NO: 2740 - DNA, 20 bp, Artificial Sequence
  Synthetic
gtaagggcatgtttagcgtg

SEQ ID NO: 2741 - DNA, 20 bp, Artificial Sequence
  Synthetic
ggctcctaagtggcacaggt

SEQ ID NO: 2742 - DNA, 20 bp, Artificial Sequence
  Synthetic
gcttctagtagggctactgg

SEQ ID NO: 2743 - DNA, 20 bp, Artificial Sequence
  Synthetic
ggttgttcgggtctcgcctt

SEQ ID NO: 2744 - DNA, 20 bp, Artificial Sequence
  Synthetic
gtgcttgaggagcggagcca

SEQ ID NO: 2745 - DNA, 20 bp, Artificial Sequence
  Synthetic
gtctttgatcagtgtagggt

SEQ ID NO: 2746 - DNA, 20 bp, Artificial Sequence
  Synthetic
gcttgtacaaagtaactcct

SEQ ID NO: 2747 - DNA, 20 bp, Artificial Sequence
  Synthetic
gctccattgagggctttggt

SEQ ID NO: 2748 - DNA, 20 bp, Artificial Sequence
  Synthetic
gtcacatgacagacgagtgg

SEQ ID NO: 2749 - DNA, 20 bp, Artificial Sequence
  Synthetic
gggacactggactgagttgg

SEQ ID NO: 2750 - DNA, 20 bp, Artificial Sequence
  Synthetic
gatcagtgtagggtgggctt

SEQ ID NO: 2751 - DNA, 20 bp, Artificial Sequence
  Synthetic
gcgtctgtcaggagcctttc

SEQ ID NO: 2752 - DNA, 20 bp, Artificial Sequence
  Synthetic
gacagactcatcactgccct

SEQ ID NO: 2753 - DNA, 20 bp, Artificial Sequence
  Synthetic
gcacaaactggtatgggtgc

SEQ ID NO: 2754 - DNA, 20 bp, Artificial Sequence
  Synthetic
gaagccctgaaatgactcag

SEQ ID NO: 2755 - DNA, 20 bp, Artificial Sequence
  Synthetic
gactgggacgagagcttcct

SEQ ID NO: 2756 - DNA, 20 bp, Artificial Sequence
  Synthetic
ggcttcttcccttcccgctc

SEQ ID NO: 2757 - DNA, 20 bp, Artificial Sequence
  Synthetic
gtgtggtttgacagggagca

SEQ ID NO: 2758 - DNA, 20 bp, Artificial Sequence
  Synthetic
gggatacagtcacacagaga

SEQ ID NO: 2759 - DNA, 20 bp, Artificial Sequence
  Synthetic
gagctcccaggaattctaag

SEQ ID NO: 2760 - DNA, 20 bp, Artificial Sequence
  Synthetic
gctcagtggttagcacattc

SEQ ID NO: 2761 - DNA, 20 bp, Artificial Sequence
  Synthetic
gaaaccctgcttatgcaaac

SEQ ID NO: 2762 - DNA, 20 bp, Artificial Sequence
  Synthetic
gagagatacacgtttacatg

SEQ ID NO: 2763 - DNA, 20 bp, Artificial Sequence
  Synthetic
gcaacagggactgagcgagc

SEQ ID NO: 2764 - DNA, 20 bp, Artificial Sequence
  Synthetic
gaatatgagagtgcaagtgg

SEQ ID NO: 2765 - DNA, 20 bp, Artificial Sequence
  Synthetic
ggcatttgacaaagctttgc

SEQ ID NO: 2766 - DNA, 20 bp, Artificial Sequence
  Synthetic
gcactctgtgttaataacac

SEQ ID NO: 2767 - DNA, 20 bp, Artificial Sequence
  Synthetic
gtggatggagaactggacct

SEQ ID NO: 2768 - DNA, 20 bp, Artificial Sequence
  Synthetic
gtcatctgcagctcagaaag

SEQ ID NO: 2769 - DNA, 20 bp, Artificial Sequence
  Synthetic
gggattgcaggctccaagag

SEQ ID NO: 2770 - DNA, 20 bp, Artificial Sequence
  Synthetic
gtgatatgaggctctgaaga

SEQ ID NO: 2771 - DNA, 20 bp, Artificial Sequence
  Synthetic
gcagattggcagccgcatgg

SEQ ID NO: 2772 - DNA, 20 bp, Artificial Sequence
  Synthetic
gtgttagatggagatgtaat

SEQ ID NO: 2773 - DNA, 20 bp, Artificial Sequence
  Synthetic
gataaggagaagggagagaa

SEQ ID NO: 2774 - DNA, 20 bp, Artificial Sequence
  Synthetic
gcaccttctgataaggagaa

SEQ ID NO: 2775 - DNA, 20 bp, Artificial Sequence
  Synthetic
gaaacatgggatggcgtcaa

SEQ ID NO: 2776 - DNA, 20 bp, Artificial Sequence
  Synthetic
gggtgctccgtcactttagg

SEQ ID NO: 2777 - DNA, 20 bp, Artificial Sequence
  Synthetic
gcacacaccggagaaactgg

SEQ ID NO: 2778 - DNA, 20 bp, Artificial Sequence
  Synthetic
gtgagcgtgtgtgacgtcta

SEQ ID NO: 2779 - DNA, 20 bp, Artificial Sequence
  Synthetic
gacacagaaactggagggag

SEQ ID NO: 2780 - DNA, 20 bp, Artificial Sequence
  Synthetic
ggctgtctgctctgtccctg

SEQ ID NO: 2781 - DNA, 20 bp, Artificial Sequence
  Synthetic
gagttcaaagttctcggatt

SEQ ID NO: 2782 - DNA, 20 bp, Artificial Sequence
  Synthetic
gcgtgtgtgacgtctagggt

SEQ ID NO: 2783 - DNA, 20 bp, Artificial Sequence
  Synthetic
ggtgtgtctagacaggagac

SEQ ID NO: 2784 - DNA, 20 bp, Artificial Sequence
  Synthetic
gctgcacacaccggagaaac

SEQ ID NO: 2785 - DNA, 20 bp, Artificial Sequence
  Synthetic
gactggactgggcgcagatt

SEQ ID NO: 2786 - DNA, 20 bp, Artificial Sequence
  Synthetic
gcaaatcacaggatcatcgg

SEQ ID NO: 2787 - DNA, 20 bp, Artificial Sequence
  Synthetic
gaaatgcctagtgcacacat

SEQ ID NO: 2788 - DNA, 20 bp, Artificial Sequence
  Synthetic
ggcagggagatggtggaggt

SEQ ID NO: 2789 - DNA, 20 bp, Artificial Sequence
  Synthetic
gtgctatgctgtcagttcag

SEQ ID NO: 2790 - DNA, 20 bp, Artificial Sequence
  Synthetic
ggcagaagaagaaggagagc

SEQ ID NO: 2791 - DNA, 20 bp, Artificial Sequence
  Synthetic
gactgaagaattacttccaa

SEQ ID NO: 2792 - DNA, 20 bp, Artificial Sequence
  Synthetic
gagccttcggcttctctttc

SEQ ID NO: 2793 - DNA, 20 bp, Artificial Sequence
  Synthetic
ggcaccagggagaggaagag

SEQ ID NO: 2794 - DNA, 20 bp, Artificial Sequence
  Synthetic
gtagggtgtggtggttggtg

SEQ ID NO: 2795 - DNA, 20 bp, Artificial Sequence
  Synthetic
gtgcagagggaagctgaggg

SEQ ID NO: 2796 - DNA, 20 bp, Artificial Sequence
  Synthetic
gagttgggcagtttctgcta

SEQ ID NO: 2797 - DNA, 20 bp, Artificial Sequence
  Synthetic
gagaagcgatgggactctgc

SEQ ID NO: 2798 - DNA, 20 bp, Artificial Sequence
  Synthetic
gactgcgaccgtcgaagagg

SEQ ID NO: 2799 - DNA, 20 bp, Artificial Sequence
  Synthetic
gcagtgttcttcgatccaat

SEQ ID NO: 2800 - DNA, 20 bp, Artificial Sequence
  Synthetic
ggcttagtagtaagggttac

SEQ ID NO: 2801 - DNA, 20 bp, Artificial Sequence
  Synthetic
gtgaactactggaaggttgc

SEQ ID NO: 2802 - DNA, 20 bp, Artificial Sequence
  Synthetic
ggccagaaggctgcgcttct

SEQ ID NO: 2803 - DNA, 20 bp, Artificial Sequence
  Synthetic
gattccgttagcatccaggg

SEQ ID NO: 2804 - DNA, 20 bp, Artificial Sequence
  Synthetic
gaatctgaagccagcgccat

SEQ ID NO: 2805 - DNA, 20 bp, Artificial Sequence
  Synthetic
gttcgtttcctgcttccacc

SEQ ID NO: 2806 - DNA, 20 bp, Artificial Sequence
  Synthetic
gaccggcaagacagaccgac

SEQ ID NO: 2807 - DNA, 20 bp, Artificial Sequence
  Synthetic
gtgtcttccctagaggactc

SEQ ID NO: 2808 - DNA, 20 bp, Artificial Sequence
  Synthetic
gtgtggagcatgcaggacgg

SEQ ID NO: 2809 - DNA, 20 bp, Artificial Sequence
  Synthetic
gggctcaatagcttggcaga

SEQ ID NO: 2810 - DNA, 20 bp, Artificial Sequence
  Synthetic
gtggtatcctcgctctctcc

SEQ ID NO: 2811 - DNA, 20 bp, Artificial Sequence
  Synthetic
gggactccggagtgaggatg

SEQ ID NO: 2812 - DNA, 20 bp, Artificial Sequence
  Synthetic
gctctctcctggtgtgtgtg

SEQ ID NO: 2813 - DNA, 20 bp, Artificial Sequence
  Synthetic
gagtgaataaacacagaacg

SEQ ID NO: 2814 - DNA, 20 bp, Artificial Sequence
  Synthetic
gtaagtggattagatggagg

SEQ ID NO: 2815 - DNA, 20 bp, Artificial Sequence
  Synthetic
gaccaccaacagtcggagat

SEQ ID NO: 2816 - DNA, 20 bp, Artificial Sequence
  Synthetic
gccataaatagataccacca

SEQ ID NO: 2817 - DNA, 20 bp, Artificial Sequence
  Synthetic
gcagtcctgtcaaggtctgt

SEQ ID NO: 2818 - DNA, 20 bp, Artificial Sequence
  Synthetic
gacacaactgagtctgaatc

SEQ ID NO: 2819 - DNA, 20 bp, Artificial Sequence
  Synthetic
gtaaggtctgcaaagtgagt

SEQ ID NO: 2820 - DNA, 20 bp, Artificial Sequence
  Synthetic
ggcacttaaacagttgaaac

SEQ ID NO: 2821 - DNA, 20 bp, Artificial Sequence
  Synthetic
gctgagagcaacgtgggctg

SEQ ID NO: 2822 - DNA, 20 bp, Artificial Sequence
  Synthetic
gctctcagccaatcaggagg

SEQ ID NO: 2823 - DNA, 20 bp, Artificial Sequence
  Synthetic
gttgctctcagccaatcagg

SEQ ID NO: 2824 - DNA, 20 bp, Artificial Sequence
  Synthetic
gttgtgcagattgtgaaatg

SEQ ID NO: 2825 - DNA, 20 bp, Artificial Sequence
  Synthetic
gcgcatttattagaagagcg

SEQ ID NO: 2826 - DNA, 20 bp, Artificial Sequence
  Synthetic
gtgtctgacgtgtgcctggc

SEQ ID NO: 2827 - DNA, 20 bp, Artificial Sequence
  Synthetic
ggaactttggatgctttctt

SEQ ID NO: 2828 - DNA, 20 bp, Artificial Sequence
  Synthetic
ggtctgggattccgagaggc

SEQ ID NO: 2829 - DNA, 20 bp, Artificial Sequence
  Synthetic
gaaatctgcttgctaaccca

SEQ ID NO: 2830 - DNA, 20 bp, Artificial Sequence
  Synthetic
gaagtgaacgtgctgaacta

SEQ ID NO: 2831 - DNA, 20 bp, Artificial Sequence
  Synthetic
gggtgatgctgtgtgctgcg

SEQ ID NO: 2832 - DNA, 20 bp, Artificial Sequence
  Synthetic
gtctgccgctagatgcatgc

SEQ ID NO: 2833 - DNA, 20 bp, Artificial Sequence
  Synthetic
gtccactgtcttcccgagga

SEQ ID NO: 2834 - DNA, 20 bp, Artificial Sequence
  Synthetic
gggcgcatttattagaagag

SEQ ID NO: 2835 - DNA, 20 bp, Artificial Sequence
  Synthetic
gggcgtgagaggaaacgctg

SEQ ID NO: 2836 - DNA, 20 bp, Artificial Sequence
  Synthetic
gggctgggttgttgacttgg

SEQ ID NO: 2837 - DNA, 20 bp, Artificial Sequence
  Synthetic
gtgggcgtgagaggaaacgc

SEQ ID NO: 2838 - DNA, 20 bp, Artificial Sequence
  Synthetic
gcttaggctctgggaagcac

SEQ ID NO: 2839 - DNA, 20 bp, Artificial Sequence
  Synthetic
ggttcaaacagctcggctgg

SEQ ID NO: 2840 - DNA, 20 bp, Artificial Sequence
  Synthetic
gcttggcttgggaagagccc

SEQ ID NO: 2841 - DNA, 20 bp, Artificial Sequence
  Synthetic
gaactttggaagccgaagag

SEQ ID NO: 2842 - DNA, 20 bp, Artificial Sequence
  Synthetic
ggaactttggaagccgaaga

SEQ ID NO: 2843 - DNA, 20 bp, Artificial Sequence
  Synthetic
ggaataaccttggctttcct

SEQ ID NO: 2844 - DNA, 20 bp, Artificial Sequence
  Synthetic
gagagcatcggtccaacccg

SEQ ID NO: 2845 - DNA, 20 bp, Artificial Sequence
  Synthetic
gaagttctctgatcctacaa

SEQ ID NO: 2846 - DNA, 20 bp, Artificial Sequence
  Synthetic
gactcgccagtgtttctgcg

SEQ ID NO: 2847 - DNA, 20 bp, Artificial Sequence
  Synthetic
gaacgctcgaatccaaagag

SEQ ID NO: 2848 - DNA, 20 bp, Artificial Sequence
  Synthetic
gaagggaatcccaagcgagt

SEQ ID NO: 2849 - DNA, 20 bp, Artificial Sequence
  Synthetic
gcgagaaatccttggtacgc

SEQ ID NO: 2850 - DNA, 20 bp, Artificial Sequence
  Synthetic
ggctagagagggaagggaat

SEQ ID NO: 2851 - DNA, 20 bp, Artificial Sequence
  Synthetic
gagaaccagaagcgcgcagc

SEQ ID NO: 2852 - DNA, 20 bp, Artificial Sequence
  Synthetic
ggactcgtgtgcaccctcaa

SEQ ID NO: 2853 - DNA, 20 bp, Artificial Sequence
  Synthetic
gtgggcttcagagtgcatga

SEQ ID NO: 2854 - DNA, 20 bp, Artificial Sequence
  Synthetic
ggagaaacatatgcaaatac

SEQ ID NO: 2855 - DNA, 20 bp, Artificial Sequence
  Synthetic
gttggatcagaatgaggtca

SEQ ID NO: 2856 - DNA, 20 bp, Artificial Sequence
  Synthetic
gcggtcttgacgttgagcgc

SEQ ID NO: 2857 - DNA, 20 bp, Artificial Sequence
  Synthetic
gaacctccaacttaacctct

SEQ ID NO: 2858 - DNA, 20 bp, Artificial Sequence
  Synthetic
gggattaagctggaggtgga

SEQ ID NO: 2859 - DNA, 20 bp, Artificial Sequence
  Synthetic
gtagttggcatgcacagttt

SEQ ID NO: 2860 - DNA, 20 bp, Artificial Sequence
  Synthetic
gtgatggaggagcctgctga

SEQ ID NO: 2861 - DNA, 20 bp, Artificial Sequence
  Synthetic
gtattggagaatagcagcct

SEQ ID NO: 2862 - DNA, 20 bp, Artificial Sequence
  Synthetic
ggatccctagctattgaaag

SEQ ID NO: 2863 - DNA, 20 bp, Artificial Sequence
  Synthetic
gtcagacgctccctatctga

SEQ ID NO: 2864 - DNA, 20 bp, Artificial Sequence
  Synthetic
ggcttcttgagtgagccaca

SEQ ID NO: 2865 - DNA, 20 bp, Artificial Sequence
  Synthetic
gctcaaggttctgacggact

SEQ ID NO: 2866 - DNA, 20 bp, Artificial Sequence
  Synthetic
gtatgcgagaccctgagttc

SEQ ID NO: 2867 - DNA, 20 bp, Artificial Sequence
  Synthetic
gctaagaataaatagagtca

SEQ ID NO: 2868 - DNA, 20 bp, Artificial Sequence
  Synthetic
gttcacgaggtgaagggctg

SEQ ID NO: 2869 - DNA, 20 bp, Artificial Sequence
  Synthetic
gaggcaccaatgcattgtcg

SEQ ID NO: 2870 - DNA, 20 bp, Artificial Sequence
  Synthetic
gaaatgcaggtatcccaccc

SEQ ID NO: 2871 - DNA, 20 bp, Artificial Sequence
  Synthetic
gtaaggtccgaggtggtggc

SEQ ID NO: 2872 - DNA, 20 bp, Artificial Sequence
  Synthetic
gtggtgtggacacgtctcac

SEQ ID NO: 2873 - DNA, 20 bp, Artificial Sequence
  Synthetic
gatgtcccagtatcagggac

SEQ ID NO: 2874 - DNA, 20 bp, Artificial Sequence
  Synthetic
gctatgatgtcccagtatca

SEQ ID NO: 2875 - DNA, 20 bp, Artificial Sequence
  Synthetic
ggctactatcagctcaggat

SEQ ID NO: 2876 - DNA, 20 bp, Artificial Sequence
  Synthetic
gtagacttgggtcgggattc

SEQ ID NO: 2877 - DNA, 20 bp, Artificial Sequence
  Synthetic
ggctatgatgtcccagtatc

SEQ ID NO: 2878 - DNA, 20 bp, Artificial Sequence
  Synthetic
gtctagcagggagcagaggg

SEQ ID NO: 2879 - DNA, 20 bp, Artificial Sequence
  Synthetic
gcctgtggtctgtttgggag

SEQ ID NO: 2880 - DNA, 20 bp, Artificial Sequence
  Synthetic
gggagctccgattaggcctc

SEQ ID NO: 2881 - DNA, 20 bp, Artificial Sequence
  Synthetic
gccaaagcgactggtctaca

SEQ ID NO: 2882 - DNA, 20 bp, Artificial Sequence
  Synthetic
gttgcgttgtgcacctagtc

SEQ ID NO: 2883 - DNA, 20 bp, Artificial Sequence
  Synthetic
gtctagcatccatggtattc

SEQ ID NO: 2884 - DNA, 20 bp, Artificial Sequence
  Synthetic
gctggaagctgtagttccct

SEQ ID NO: 2885 - DNA, 20 bp, Artificial Sequence
  Synthetic
gatggaaaggaaggatgaat

SEQ ID NO: 2886 - DNA, 20 bp, Artificial Sequence
  Synthetic
gcggcggcgatgaatttgag

SEQ ID NO: 2887 - DNA, 20 bp, Artificial Sequence
  Synthetic
gactttcacaggtgcacatg

SEQ ID NO: 2888 - DNA, 20 bp, Artificial Sequence
  Synthetic
gtttccactactaagtcaga

SEQ ID NO: 2889 - DNA, 20 bp, Artificial Sequence
  Synthetic
gtttattcaaaccctttggt

SEQ ID NO: 2890 - DNA, 20 bp, Artificial Sequence
  Synthetic
gaagacctcctgacagatgc

SEQ ID NO: 2891 - DNA, 20 bp, Artificial Sequence
  Synthetic
gaatcttcctaattgctacg

SEQ ID NO: 2892 - DNA, 20 bp, Artificial Sequence
  Synthetic
gtgtttgcctacttctagag

SEQ ID NO: 2893 - DNA, 20 bp, Artificial Sequence
  Synthetic
ggatacccttccttcctgga

SEQ ID NO: 2894 - DNA, 20 bp, Artificial Sequence
  Synthetic
ggcggccctgctgtttaagt

SEQ ID NO: 2895 - DNA, 20 bp, Artificial Sequence
  Synthetic
ggttcgagtttcccgcctct

SEQ ID NO: 2896 - DNA, 20 bp, Artificial Sequence
  Synthetic
gagatcccaactggaatgtc

SEQ ID NO: 2897 - DNA, 20 bp, Artificial Sequence
  Synthetic
gggcacaaagatggagggcg

SEQ ID NO: 2898 - DNA, 20 bp, Artificial Sequence
  Synthetic
gctcctttgaagcctgcacc

SEQ ID NO: 2899 - DNA, 20 bp, Artificial Sequence
  Synthetic
gttgcaaggaagtcctgttc

SEQ ID NO: 2900 - DNA, 20 bp, Artificial Sequence
  Synthetic
gtaggagatgcaggaagcac

SEQ ID NO: 2901 - DNA, 20 bp, Artificial Sequence
  Synthetic
gaagaccagacaagaggcag

SEQ ID NO: 2902 - DNA, 20 bp, Artificial Sequence
  Synthetic
gaagtttccggaagcattca

SEQ ID NO: 2903 - DNA, 20 bp, Artificial Sequence
  Synthetic
gagttctgagtcttctcatt

SEQ ID NO: 2904 - DNA, 20 bp, Artificial Sequence
  Synthetic
gttatgggcgtcccagcacg

SEQ ID NO: 2905 - DNA, 20 bp, Artificial Sequence
  Synthetic
ggcatttctcagtggagcgg

SEQ ID NO: 2906 - DNA, 20 bp, Artificial Sequence
  Synthetic
gtgcacgcttgtttgtgcgc

SEQ ID NO: 2907 - DNA, 20 bp, Artificial Sequence
  Synthetic
gacagcaggtgaaggagaaa

SEQ ID NO: 2908 - DNA, 20 bp, Artificial Sequence
  Synthetic
gcttggagagggaagagact

SEQ ID NO: 2909 - DNA, 20 bp, Artificial Sequence
  Synthetic
gcggcactgcacagatgcag

SEQ ID NO: 2910 - DNA, 20 bp, Artificial Sequence
  Synthetic
gcacccaaatttataaagca

SEQ ID NO: 2911 - DNA, 20 bp, Artificial Sequence
  Synthetic
ggtagaagccaagctctcca

SEQ ID NO: 2912 - DNA, 20 bp, Artificial Sequence
  Synthetic
gaagtctgggttaccctctg

SEQ ID NO: 2913 - DNA, 20 bp, Artificial Sequence
  Synthetic
gatggaatgctctcatatcc

SEQ ID NO: 2914 - DNA, 20 bp, Artificial Sequence
  Synthetic
ggataggtgagacagaaaca

SEQ ID NO: 2915 - DNA, 20 bp, Artificial Sequence
  Synthetic
gcttgggagcactagaaaga

SEQ ID NO: 2916 - DNA, 20 bp, Artificial Sequence
  Synthetic
gtcttacccagcactccctc

SEQ ID NO: 2917 - DNA, 20 bp, Artificial Sequence
  Synthetic
ggaccaggcagactctgcta

SEQ ID NO: 2918 - DNA, 20 bp, Artificial Sequence
  Synthetic
ggagagccttgctcaccctc

SEQ ID NO: 2919 - DNA, 20 bp, Artificial Sequence
  Synthetic
gatccaatcgcgcagattta

SEQ ID NO: 2920 - DNA, 20 bp, Artificial Sequence
  Synthetic
gatctgtcaggaaacctgcc

SEQ ID NO: 2921 - DNA, 20 bp, Artificial Sequence
  Synthetic
gttgccttctcctggacagt

SEQ ID NO: 2922 - DNA, 20 bp, Artificial Sequence
  Synthetic
gatcaggtaacaggtgctct

SEQ ID NO: 2923 - DNA, 20 bp, Artificial Sequence
  Synthetic
gagagcactgactggtgttg

SEQ ID NO: 2924 - DNA, 20 bp, Artificial Sequence
  Synthetic
gcgacactaagaagtttgcc

SEQ ID NO: 2925 - DNA, 20 bp, Artificial Sequence
  Synthetic
gggagtgaagtttggtcacg

SEQ ID NO: 2926 - DNA, 20 bp, Artificial Sequence
  Synthetic
gtgtgggaaggcgagctgtg

SEQ ID NO: 2927 - DNA, 20 bp, Artificial Sequence
  Synthetic
gcatcctgaaacagaaagcc

SEQ ID NO: 2928 - DNA, 20 bp, Artificial Sequence
  Synthetic
ggagtctgaaagaggaggtg

SEQ ID NO: 2929 - DNA, 20 bp, Artificial Sequence
  Synthetic
gtcaccgcattaacctcttc

SEQ ID NO: 2930 - DNA, 20 bp, Artificial Sequence
  Synthetic
ggagctttgctgctctgggc

SEQ ID NO: 2931 - DNA, 20 bp, Artificial Sequence
  Synthetic
gggagaggccacaagaagga

SEQ ID NO: 2932 - DNA, 20 bp, Artificial Sequence
  Synthetic
gccgagattctccagggact

SEQ ID NO: 2933 - DNA, 20 bp, Artificial Sequence
  Synthetic
gaaagataaagaacgggctg

SEQ ID NO: 2934 - DNA, 20 bp, Artificial Sequence
  Synthetic
gatttcgtataaggctttac

SEQ ID NO: 2935 - DNA, 20 bp, Artificial Sequence
  Synthetic
gctacttacaaggcaatagt

SEQ ID NO: 2936 - DNA, 20 bp, Artificial Sequence
  Synthetic
gcgggcctctgaggaatagc

SEQ ID NO: 2937 - DNA, 20 bp, Artificial Sequence
  Synthetic
gccggaaatcagaccataaa

SEQ ID NO: 2938 - DNA, 20 bp, Artificial Sequence
  Synthetic
ggagagaactcttccaaagg

SEQ ID NO: 2939 - DNA, 20 bp, Artificial Sequence
  Synthetic
ggccaaggaactatcaccag

SEQ ID NO: 2940 - DNA, 20 bp, Artificial Sequence
  Synthetic
gctgcctcttaactcttctt

SEQ ID NO: 2941 - DNA, 20 bp, Artificial Sequence
  Synthetic
gacacctgcagcatgtccca

SEQ ID NO: 2942 - DNA, 20 bp, Artificial Sequence
  Synthetic
gctgggacagcaggaagctc

SEQ ID NO: 2943 - DNA, 20 bp, Artificial Sequence
  Synthetic
gctagagacctgcataggaa

SEQ ID NO: 2944 - DNA, 20 bp, Artificial Sequence
  Synthetic
gggagtcatggcctgcaatt

SEQ ID NO: 2945 - DNA, 20 bp, Artificial Sequence
  Synthetic
gtggttggtggcacgattgt

SEQ ID NO: 2946 - DNA, 20 bp, Artificial Sequence
  Synthetic
gcctgtttctttgggccgct

SEQ ID NO: 2947 - DNA, 20 bp, Artificial Sequence
  Synthetic
gagtgagcagaagggagggt

SEQ ID NO: 2948 - DNA, 20 bp, Artificial Sequence
  Synthetic
gcaattgggagtgagcagaa

SEQ ID NO: 2949 - DNA, 20 bp, Artificial Sequence
  Synthetic
gcccaacatcagacttccca

SEQ ID NO: 2950 - DNA, 20 bp, Artificial Sequence
  Synthetic
ggcagtttccagaatcttca

SEQ ID NO: 2951 - DNA, 20 bp, Artificial Sequence
  Synthetic
gatcacctgtgggaggactc

SEQ ID NO: 2952 - DNA, 20 bp, Artificial Sequence
  Synthetic
gcagtaactcctccaaggcc

SEQ ID NO: 2953 - DNA, 20 bp, Artificial Sequence
  Synthetic
gaagaccacctgtgcaaagc

SEQ ID NO: 2954 - DNA, 20 bp, Artificial Sequence
  Synthetic
ggagccgacttagggaagcc

SEQ ID NO: 2955 - DNA, 20 bp, Artificial Sequence
  Synthetic
gtgcctccttgcttcctctc

SEQ ID NO: 2956 - DNA, 20 bp, Artificial Sequence
  Synthetic
ggacggcagtaactcctcca

SEQ ID NO: 2957 - DNA, 20 bp, Artificial Sequence
  Synthetic
gaacctaagggacagtccaa

SEQ ID NO: 2958 - DNA, 20 bp, Artificial Sequence
  Synthetic
gtctgaaagctaaagggtgg

SEQ ID NO: 2959 - DNA, 20 bp, Artificial Sequence
  Synthetic
gctctggcaagtcccaatcc

SEQ ID NO: 2960 - DNA, 20 bp, Artificial Sequence
  Synthetic
gtttggctgataaacagaat

SEQ ID NO: 2961 - DNA, 20 bp, Artificial Sequence
  Synthetic
gggtgcctgccttggaagat

SEQ ID NO: 2962 - DNA, 20 bp, Artificial Sequence
  Synthetic
gaaagacccaagtgtgggct

SEQ ID NO: 2963 - DNA, 20 bp, Artificial Sequence
  Synthetic
gagaaccacaaatccacttg

SEQ ID NO: 2964 - DNA, 20 bp, Artificial Sequence
  Synthetic
gcaggaccttaggaagcttc

SEQ ID NO: 2965 - DNA, 20 bp, Artificial Sequence
  Synthetic
gtgagtttagaaactctctg

SEQ ID NO: 2966 - DNA, 20 bp, Artificial Sequence
  Synthetic
gactattaatgagcgggagg

SEQ ID NO: 2967 - DNA, 20 bp, Artificial Sequence
  Synthetic
gttggtttctgactgacacc

SEQ ID NO: 2968 - DNA, 20 bp, Artificial Sequence
  Synthetic
gtcctctgggagactcagcc

SEQ ID NO: 2969 - DNA, 20 bp, Artificial Sequence
  Synthetic
gactcccactagctggagaa

SEQ ID NO: 2970 - DNA, 20 bp, Artificial Sequence
  Synthetic
gacatattgttggacttgaa

SEQ ID NO: 2971 - DNA, 20 bp, Artificial Sequence
  Synthetic
ggctgtaaacagcacacctg

SEQ ID NO: 2972 - DNA, 20 bp, Artificial Sequence
  Synthetic
gggtaagaacattaagggag

SEQ ID NO: 2973 - DNA, 20 bp, Artificial Sequence
  Synthetic
gacatgccaatgttgcagag

SEQ ID NO: 2974 - DNA, 20 bp, Artificial Sequence
  Synthetic
gatttccatcatatgatcat

SEQ ID NO: 2975 - DNA, 20 bp, Artificial Sequence
  Synthetic
gcctaagagatccagatgaa

SEQ ID NO: 2976 - DNA, 20 bp, Artificial Sequence
  Synthetic
gcatctgcagtcctgctccc

SEQ ID NO: 2977 - DNA, 20 bp, Artificial Sequence
  Synthetic
gatcctctgagagctttctg

SEQ ID NO: 2978 - DNA, 20 bp, Artificial Sequence
  Synthetic
gtgttgcagtcactgaggga

SEQ ID NO: 2979 - DNA, 20 bp, Artificial Sequence
  Synthetic
gctttgttctgcaagagttc

SEQ ID NO: 2980 - DNA, 20 bp, Artificial Sequence
  Synthetic
gggaaccaaacacctgactc

SEQ ID NO: 2981 - DNA, 20 bp, Artificial Sequence
  Synthetic
gggaagagtctgtgcttgaa

SEQ ID NO: 2982 - DNA, 20 bp, Artificial Sequence
  Synthetic
gagatctgaaggtgacctct

SEQ ID NO: 2983 - DNA, 20 bp, Artificial Sequence
  Synthetic
gccaatcgcggacctctgct

SEQ ID NO: 2984 - DNA, 20 bp, Artificial Sequence
  Synthetic
ggaaggagatccacacaatt

SEQ ID NO: 2985 - DNA, 20 bp, Artificial Sequence
  Synthetic
gagttcgtgaaatgaggaaa

SEQ ID NO: 2986 - DNA, 20 bp, Artificial Sequence
  Synthetic
gtcttccgagggccttcctg

SEQ ID NO: 2987 - DNA, 20 bp, Artificial Sequence
  Synthetic
gctcttctgattaatggact

SEQ ID NO: 2988 - DNA, 20 bp, Artificial Sequence
  Synthetic
gggctgggaacatgtcttcc

SEQ ID NO: 2989 - DNA, 20 bp, Artificial Sequence
  Synthetic
ggaaggaccacaggatgcag

SEQ ID NO: 2990 - DNA, 20 bp, Artificial Sequence
  Synthetic
gaggcctcctggctctcttg

SEQ ID NO: 2991 - DNA, 20 bp, Artificial Sequence
  Synthetic
gtaatttacgtgtgagtttg

SEQ ID NO: 2992 - DNA, 20 bp, Artificial Sequence
  Synthetic
gtccctctacattccgaggc

SEQ ID NO: 2993 - DNA, 20 bp, Artificial Sequence
  Synthetic
ggtgaagaaagagggcttgg

SEQ ID NO: 2994 - DNA, 20 bp, Artificial Sequence
  Synthetic
gcctcctggctctcttgtgg

SEQ ID NO: 2995 - DNA, 20 bp, Artificial Sequence
  Synthetic
gagcatgctcactctagggt

SEQ ID NO: 2996 - DNA, 20 bp, Artificial Sequence
  Synthetic
gagcctcctcgggaaagctt

SEQ ID NO: 2997 - DNA, 20 bp, Artificial Sequence
  Synthetic
gcagaggattatttcactca

SEQ ID NO: 2998 - DNA, 20 bp, Artificial Sequence
  Synthetic
gggagggacagatgactgag

SEQ ID NO: 2999 - DNA, 20 bp, Artificial Sequence
  Synthetic
gtggatgggaccctttccaa

SEQ ID NO: 3000 - DNA, 20 bp, Artificial Sequence
  Synthetic
gaactgtggtttgggaggtc

SEQ ID NO: 3001 - DNA, 20 bp, Artificial Sequence
  Synthetic
gctgcctcaaagtggaggtt

SEQ ID NO: 3002 - DNA, 20 bp, Artificial Sequence
  Synthetic
gatgaggaagtccattccct

SEQ ID NO: 3003 - DNA, 20 bp, Artificial Sequence
  Synthetic
gaccagcaatagaagcctga

SEQ ID NO: 3004 - DNA, 20 bp, Artificial Sequence
  Synthetic
gtgtgagatccagacaggga

SEQ ID NO: 3005 - DNA, 20 bp, Artificial Sequence
  Synthetic
gagcgagagagaaagcagtg

SEQ ID NO: 3006 - DNA, 20 bp, Artificial Sequence
  Synthetic
gatagcactctgagagggag

SEQ ID NO: 3007 - DNA, 20 bp, Artificial Sequence
  Synthetic
gcaaagagtgagagggcgat

SEQ ID NO: 3008 - DNA, 20 bp, Artificial Sequence
  Synthetic
gccagatctctcatgctgaa

SEQ ID NO: 3009 - DNA, 20 bp, Artificial Sequence
  Synthetic
ggaatgagggatttgggagg

SEQ ID NO: 3010 - DNA, 20 bp, Artificial Sequence
  Synthetic
gaagaaagggaggtctctga

SEQ ID NO: 3011 - DNA, 20 bp, Artificial Sequence
  Synthetic
gctactattgagcagcctta

SEQ ID NO: 3012 - DNA, 20 bp, Artificial Sequence
  Synthetic
gctttgcctgttggcggttt

SEQ ID NO: 3013 - DNA, 20 bp, Artificial Sequence
  Synthetic
gtgtgctcttatccctagtt

SEQ ID NO: 3014 - DNA, 20 bp, Artificial Sequence
  Synthetic
ggctgacagagcaattcgac

SEQ ID NO: 3015 - DNA, 20 bp, Artificial Sequence
  Synthetic
gaagccgcctcttctagaaa

SEQ ID NO: 3016 - DNA, 20 bp, Artificial Sequence
  Synthetic
gtgggtgagggatactctct

SEQ ID NO: 3017 - DNA, 20 bp, Artificial Sequence
  Synthetic
gaaaggaagccgaggaggga

SEQ ID NO: 3018 - DNA, 20 bp, Artificial Sequence
  Synthetic
gagagtatccctcacccacc

SEQ ID NO: 3019 - DNA, 20 bp, Artificial Sequence
  Synthetic
gctacaaagaaaggaagccg

SEQ ID NO: 3020 - DNA, 20 bp, Artificial Sequence
  Synthetic
gggtcccaggacatttctct

SEQ ID NO: 3021 - DNA, 20 bp, Artificial Sequence
  Synthetic
gtagtgggttcaaggtgccg

SEQ ID NO: 3022 - DNA, 20 bp, Artificial Sequence
  Synthetic
gaatgcaacagtggattgcc

SEQ ID NO: 3023 - DNA, 20 bp, Artificial Sequence
  Synthetic
gatgcagcagctattctctc

SEQ ID NO: 3024 - DNA, 20 bp, Artificial Sequence
  Synthetic
gggcaaatcaatatttaccc

SEQ ID NO: 3025 - DNA, 20 bp, Artificial Sequence
  Synthetic
gcggtgtttacaggctggac

SEQ ID NO: 3026 - DNA, 20 bp, Artificial Sequence
  Synthetic
gaactggtcagacatccaga

SEQ ID NO: 3027 - DNA, 20 bp, Artificial Sequence
  Synthetic
gctagaccctcccaaggatg

SEQ ID NO: 3028 - DNA, 20 bp, Artificial Sequence
  Synthetic
gcagtaagaaggtaaactcg

SEQ ID NO: 3029 - DNA, 20 bp, Artificial Sequence
  Synthetic
gaaaggactccctgggtgtg

SEQ ID NO: 3030 - DNA, 20 bp, Artificial Sequence
  Synthetic
gaggcaaggaggaagccaaa

SEQ ID NO: 3031 - DNA, 20 bp, Artificial Sequence
  Synthetic
gtttcatacccgtagggctc

SEQ ID NO: 3032 - DNA, 20 bp, Artificial Sequence
  Synthetic
gttcaaatgctgattatctc

SEQ ID NO: 3033 - DNA, 20 bp, Artificial Sequence
  Synthetic
gaaggtgctttgcagatgga

SEQ ID NO: 3034 - DNA, 20 bp, Artificial Sequence
  Synthetic
gatggaagggtggtggcttt

SEQ ID NO: 3035 - DNA, 20 bp, Artificial Sequence
  Synthetic
gaagctgagatgtgttctta

SEQ ID NO: 3036 - DNA, 20 bp, Artificial Sequence
  Synthetic
gacctgcgtgtggagattgg

SEQ ID NO: 3037 - DNA, 20 bp, Artificial Sequence
  Synthetic
ggagggtagacgacgacgtg

SEQ ID NO: 3038 - DNA, 20 bp, Artificial Sequence
  Synthetic
gctcctaaacgctgctctct

SEQ ID NO: 3039 - DNA, 20 bp, Artificial Sequence
  Synthetic
gtgggtagaggccatgatga

SEQ ID NO: 3040 - DNA, 20 bp, Artificial Sequence
  Synthetic
gtaggaaagacatggaattc

SEQ ID NO: 3041 - DNA, 20 bp, Artificial Sequence
  Synthetic
gataagaatggagaccttcg

SEQ ID NO: 3042 - DNA, 20 bp, Artificial Sequence
  Synthetic
ggtattggccgggtgtgtga

SEQ ID NO: 3043 - DNA, 20 bp, Artificial Sequence
  Synthetic
ggacatgaaggaggcttctt

SEQ ID NO: 3044 - DNA, 20 bp, Artificial Sequence
  Synthetic
gccagagaaagagggattct

SEQ ID NO: 3045 - DNA, 20 bp, Artificial Sequence
  Synthetic
gaaactggcccagcctagtc

SEQ ID NO: 3046 - DNA, 20 bp, Artificial Sequence
  Synthetic
ggacgggacatgaggagaca

SEQ ID NO: 3047 - DNA, 20 bp, Artificial Sequence
  Synthetic
gcatcaaggtccagcctggg

SEQ ID NO: 3048 - DNA, 20 bp, Artificial Sequence
  Synthetic
ggcactcccaaactacctat

SEQ ID NO: 3049 - DNA, 20 bp, Artificial Sequence
  Synthetic
gccattaaccctacttcagg

SEQ ID NO: 3050 - DNA, 20 bp, Artificial Sequence
  Synthetic
gcagtgcatgtgtatttgta

SEQ ID NO: 3051 - DNA, 20 bp, Artificial Sequence
  Synthetic
gaccgattgacaattagacc

SEQ ID NO: 3052 - DNA, 20 bp, Artificial Sequence
  Synthetic
gaaggcaagagatgcttctt

SEQ ID NO: 3053 - DNA, 20 bp, Artificial Sequence
  Synthetic
ggctgtggaaggttcaggaa

SEQ ID NO: 3054 - DNA, 20 bp, Artificial Sequence
  Synthetic
gaggttctattaaggaggat

SEQ ID NO: 3055 - DNA, 20 bp, Artificial Sequence
  Synthetic
gctctggaaaggagagagaa

SEQ ID NO: 3056 - DNA, 20 bp, Artificial Sequence
  Synthetic
gttctgaaacgcgaagttac

SEQ ID NO: 3057 - DNA, 20 bp, Artificial Sequence
  Synthetic
gctcgcttctcccaccctga

SEQ ID NO: 3058 - DNA, 20 bp, Artificial Sequence
  Synthetic
gcagggactccctaacagcc

SEQ ID NO: 3059 - DNA, 20 bp, Artificial Sequence
  Synthetic
gggtcctgaaagctgcgagg

SEQ ID NO: 3060 - DNA, 20 bp, Artificial Sequence
  Synthetic
ggtgccgtgtatgggagtca

SEQ ID NO: 3061 - DNA, 20 bp, Artificial Sequence
  Synthetic
ggctgcttggaagctgggat

SEQ ID NO: 3062 - DNA, 20 bp, Artificial Sequence
  Synthetic
gtctgtgaaagacgctatcc

SEQ ID NO: 3063 - DNA, 20 bp, Artificial Sequence
  Synthetic
gcagtgccctgtttggtgcc

SEQ ID NO: 3064 - DNA, 20 bp, Artificial Sequence
  Synthetic
gcgcgttagcgatctcgatg

SEQ ID NO: 3065 - DNA, 20 bp, Artificial Sequence
  Synthetic
ggctgctactctcccactga

SEQ ID NO: 3066 - DNA, 20 bp, Artificial Sequence
  Synthetic
gaggactgtgttgggctgtc

SEQ ID NO: 3067 - DNA, 20 bp, Artificial Sequence
  Synthetic
gccaggtgtgaggttcaggc

SEQ ID NO: 3068 - DNA, 20 bp, Artificial Sequence
  Synthetic
ggcacctgtgggcagaaatg

SEQ ID NO: 3069 - DNA, 20 bp, Artificial Sequence
  Synthetic
gagcctggcttgcaggtgtg

SEQ ID NO: 3070 - DNA, 20 bp, Artificial Sequence
  Synthetic
gcttgtcaggtttcctgttt

SEQ ID NO: 3071 - DNA, 20 bp, Artificial Sequence
  Synthetic
gtcctgacagagtggagacc

SEQ ID NO: 3072 - DNA, 20 bp, Artificial Sequence
  Synthetic
gccgatggtcaaggtaattc

SEQ ID NO: 3073 - DNA, 20 bp, Artificial Sequence
  Synthetic
ggagggcggtactgagaaga

SEQ ID NO: 3074 - DNA, 20 bp, Artificial Sequence
  Synthetic
gcgtcccaaaggcgtcctga

SEQ ID NO: 3075 - DNA, 20 bp, Artificial Sequence
  Synthetic
gagatttgactggatggagg

SEQ ID NO: 3076 - DNA, 20 bp, Artificial Sequence
  Synthetic
gatcctttgagtgaagctct

SEQ ID NO: 3077 - DNA, 20 bp, Artificial Sequence
  Synthetic
gcctgtacaaacagtctcca

SEQ ID NO: 3078 - DNA, 20 bp, Artificial Sequence
  Synthetic
ggaaggccctggctttggtg

SEQ ID NO: 3079 - DNA, 20 bp, Artificial Sequence
  Synthetic
gcttagaaaggtgaagccgc

SEQ ID NO: 3080 - DNA, 20 bp, Artificial Sequence
  Synthetic
gggaaccacttagtcctttc

SEQ ID NO: 3081 - DNA, 20 bp, Artificial Sequence
  Synthetic
gagacctgacaaccagagtt

SEQ ID NO: 3082 - DNA, 20 bp, Artificial Sequence
  Synthetic
ggctgtcttgtgtagatctt

SEQ ID NO: 3083 - DNA, 20 bp, Artificial Sequence
  Synthetic
gaccctaaggcggcaatatc

SEQ ID NO: 3084 - DNA, 20 bp, Artificial Sequence
  Synthetic
gagtaagagagagaaagaga

SEQ ID NO: 3085 - DNA, 20 bp, Artificial Sequence
  Synthetic
gctgctgagattggcggagg

SEQ ID NO: 3086 - DNA, 20 bp, Artificial Sequence
  Synthetic
gagccgccaggagtgtatga

SEQ ID NO: 3087 - DNA, 20 bp, Artificial Sequence
  Synthetic
gccaacagatatactaacat

SEQ ID NO: 3088 - DNA, 20 bp, Artificial Sequence
  Synthetic
gcagtttatgaggcgtttag

SEQ ID NO: 3089 - DNA, 20 bp, Artificial Sequence
  Synthetic
ggtggagagcctaatatttg

SEQ ID NO: 3090 - DNA, 20 bp, Artificial Sequence
  Synthetic
gtagagacccagccagagac

SEQ ID NO: 3091 - DNA, 20 bp, Artificial Sequence
  Synthetic
gttagggtggtgtctggtac

SEQ ID NO: 3092 - DNA, 20 bp, Artificial Sequence
  Synthetic
gaagggtaagcaacaaggcc

SEQ ID NO: 3093 - DNA, 20 bp, Artificial Sequence
  Synthetic
gatcagggagggcacaaact

SEQ ID NO: 3094 - DNA, 20 bp, Artificial Sequence
  Synthetic
gtctctggctgggtctctac

SEQ ID NO: 3095 - DNA, 20 bp, Artificial Sequence
  Synthetic
gtcctgccttgtgcaactga

SEQ ID NO: 3096 - DNA, 20 bp, Artificial Sequence
  Synthetic
ggagccctcttcatccacca

SEQ ID NO: 3097 - DNA, 20 bp, Artificial Sequence
  Synthetic
gtgtcgtgctgtcgagagaa

SEQ ID NO: 3098 - DNA, 20 bp, Artificial Sequence
  Synthetic
gaacctattgaaggccttgg

SEQ ID NO: 3099 - DNA, 20 bp, Artificial Sequence
  Synthetic
gtgatctctcccaggccaat

SEQ ID NO: 3100 - DNA, 20 bp, Artificial Sequence
  Synthetic
ggtaacccttgaaacttctc

SEQ ID NO: 3101 - DNA, 20 bp, Artificial Sequence
  Synthetic
gcctgagctagggcaagtcc

SEQ ID NO: 3102 - DNA, 20 bp, Artificial Sequence
  Synthetic
gcggaggaagccaaagcagg

SEQ ID NO: 3103 - DNA, 20 bp, Artificial Sequence
  Synthetic
gatgagttgatggataggta

SEQ ID NO: 3104 - DNA, 20 bp, Artificial Sequence
  Synthetic
gatgccgcatggaaagagga

SEQ ID NO: 3105 - DNA, 20 bp, Artificial Sequence
  Synthetic
gagaggctgagggagagaaa

SEQ ID NO: 3106 - DNA, 20 bp, Artificial Sequence
  Synthetic
ggagggcaagagttcaggga

SEQ ID NO: 3107 - DNA, 20 bp, Artificial Sequence
  Synthetic
gcctcaaatacataaatcca

SEQ ID NO: 3108 - DNA, 20 bp, Artificial Sequence
  Synthetic
gggaaatagagccaatgtct

SEQ ID NO: 3109 - DNA, 20 bp, Artificial Sequence
  Synthetic
gtcccaagattgcaggagct

SEQ ID NO: 3110 - DNA, 20 bp, Artificial Sequence
  Synthetic
ggtgaacaacaacctggatt

SEQ ID NO: 3111 - DNA, 20 bp, Artificial Sequence
  Synthetic
gaagggctgggaggccactt

SEQ ID NO: 3112 - DNA, 20 bp, Artificial Sequence
  Synthetic
gggagccaaggctggtttcg

SEQ ID NO: 3113 - DNA, 20 bp, Artificial Sequence
  Synthetic
gggagcaaagcaggaatcct

SEQ ID NO: 3114 - DNA, 20 bp, Artificial Sequence
  Synthetic
gccaatcagcgctcatgccc

SEQ ID NO: 3115 - DNA, 20 bp, Artificial Sequence
  Synthetic
gggtctggatttccgtttaa

SEQ ID NO: 3116 - DNA, 20 bp, Artificial Sequence
  Synthetic
gctgcctcaaaggagaaccc

SEQ ID NO: 3117 - DNA, 20 bp, Artificial Sequence
  Synthetic
ggctgcctcaaaggagaacc

SEQ ID NO: 3118 - DNA, 20 bp, Artificial Sequence
  Synthetic
ggcgacgcagctttaaacag

SEQ ID NO: 3119 - DNA, 20 bp, Artificial Sequence
  Synthetic
gaaccgagattggagtcata

SEQ ID NO: 3120 - DNA, 20 bp, Artificial Sequence
  Synthetic
gtcctgcgatggtttcgttt

SEQ ID NO: 3121 - DNA, 20 bp, Artificial Sequence
  Synthetic
gtcttctggtttcattctaa

SEQ ID NO: 3122 - DNA, 20 bp, Artificial Sequence
  Synthetic
ggaacagcgagcaccgaagg

SEQ ID NO: 3123 - DNA, 20 bp, Artificial Sequence
  Synthetic
gaggcaacgtagctgcatcc

SEQ ID NO: 3124 - DNA, 20 bp, Artificial Sequence
  Synthetic
gccaagcatcctagagggta

SEQ ID NO: 3125 - DNA, 20 bp, Artificial Sequence
  Synthetic
gaagcagagaggcctcccta

SEQ ID NO: 3126 - DNA, 20 bp, Artificial Sequence
  Synthetic
gttgcctgtagccctggagg

SEQ ID NO: 3127 - DNA, 20 bp, Artificial Sequence
  Synthetic
gctgcatcctgggccatgac

SEQ ID NO: 3128 - DNA, 20 bp, Artificial Sequence
  Synthetic
gggatagagagatgcaaagc

SEQ ID NO: 3129 - DNA, 20 bp, Artificial Sequence
  Synthetic
gaacaaggacccaagcttcc

SEQ ID NO: 3130 - DNA, 20 bp, Artificial Sequence
  Synthetic
ggagaggtgtctgggtgtga

SEQ ID NO: 3131 - DNA, 20 bp, Artificial Sequence
  Synthetic
gctcccacctgcaggcaact

SEQ ID NO: 3132 - DNA, 20 bp, Artificial Sequence
  Synthetic
gtcttcttgaaggcagtcac

SEQ ID NO: 3133 - DNA, 20 bp, Artificial Sequence
  Synthetic
ggccttgtgggttaaaggga

SEQ ID NO: 3134 - DNA, 20 bp, Artificial Sequence
  Synthetic
gatcacaaactaaaggctgt

SEQ ID NO: 3135 - DNA, 20 bp, Artificial Sequence
  Synthetic
gcagttcatttccgaatgaa

SEQ ID NO: 3136 - DNA, 20 bp, Artificial Sequence
  Synthetic
gacagaggcggcggctttag

SEQ ID NO: 3137 - DNA, 20 bp, Artificial Sequence
  Synthetic
gagctccaagggagaggaat

SEQ ID NO: 3138 - DNA, 20 bp, Artificial Sequence
  Synthetic
gagagacacaaccaacgctg

SEQ ID NO: 3139 - DNA, 20 bp, Artificial Sequence
  Synthetic
gccagaatctatcatcgagt

SEQ ID NO: 3140 - DNA, 20 bp, Artificial Sequence
  Synthetic
gcatctggcgagcttgttaa

SEQ ID NO: 3141 - DNA, 20 bp, Artificial Sequence
  Synthetic
gtctttcaggtccctgctga

SEQ ID NO: 3142 - DNA, 20 bp, Artificial Sequence
  Synthetic
gcgaagggagaggtctgtgg

SEQ ID NO: 3143 - DNA, 20 bp, Artificial Sequence
  Synthetic
gacgcgaagggagaggtctg

SEQ ID NO: 3144 - DNA, 20 bp, Artificial Sequence
  Synthetic
ggtagtgtctcacagctccc

SEQ ID NO: 3145 - DNA, 20 bp, Artificial Sequence
  Synthetic
gttgcacagagccagcaaag

SEQ ID NO: 3146 - DNA, 20 bp, Artificial Sequence
  Synthetic
gtctcagctcagtgcggagg

SEQ ID NO: 3147 - DNA, 20 bp, Artificial Sequence
  Synthetic
gagtccaggagggaatctgg

SEQ ID NO: 3148 - DNA, 20 bp, Artificial Sequence
  Synthetic
gagcaagcatgccagtttga

SEQ ID NO: 3149 - DNA, 20 bp, Artificial Sequence
  Synthetic
gaagctgtctttgtgaactg

SEQ ID NO: 3150 - DNA, 20 bp, Artificial Sequence
  Synthetic
gggttgcagcggtcagttct

SEQ ID NO: 3151 - DNA, 20 bp, Artificial Sequence
  Synthetic
gaggccaggccagcaagtag

SEQ ID NO: 3152 - DNA, 20 bp, Artificial Sequence
  Synthetic
gctgcaaaccgcacaggtgg

SEQ ID NO: 3153 - DNA, 20 bp, Artificial Sequence
  Synthetic
gttggatacactgtttgtct

SEQ ID NO: 3154 - DNA, 20 bp, Artificial Sequence
  Synthetic
gaaccacctcggagctctta

SEQ ID NO: 3155 - DNA, 20 bp, Artificial Sequence
  Synthetic
gcacacacacacacaggagg

SEQ ID NO: 3156 - DNA, 20 bp, Artificial Sequence
  Synthetic
ggatttatttggctgcaatg

SEQ ID NO: 3157 - DNA, 20 bp, Artificial Sequence
  Synthetic
gtagtaactagatgtgacca

SEQ ID NO: 3158 - DNA, 20 bp, Artificial Sequence
  Synthetic
ggaagggaggaaggaggctt

SEQ ID NO: 3159 - DNA, 20 bp, Artificial Sequence
  Synthetic
gcaacttggtgggtgggtgc

SEQ ID NO: 3160 - DNA, 20 bp, Artificial Sequence
  Synthetic
gagtcagatagggattaaat

SEQ ID NO: 3161 - DNA, 20 bp, Artificial Sequence
  Synthetic
ggagaaagagaagctggagc

SEQ ID NO: 3162 - DNA, 20 bp, Artificial Sequence
  Synthetic
gggaagagatctacccaggc

SEQ ID NO: 3163 - DNA, 20 bp, Artificial Sequence
  Synthetic
gccgtcataccattggccga

SEQ ID NO: 3164 - DNA, 20 bp, Artificial Sequence
  Synthetic
gaactccttctccagctcca

SEQ ID NO: 3165 - DNA, 20 bp, Artificial Sequence
  Synthetic
ggaggagagaggatcgaggg

SEQ ID NO: 3166 - DNA, 20 bp, Artificial Sequence
  Synthetic
gaggagagaggatcgaggga

SEQ ID NO: 3167 - DNA, 20 bp, Artificial Sequence
  Synthetic
ggaagccgcagctctcacct

SEQ ID NO: 3168 - DNA, 20 bp, Artificial Sequence
  Synthetic
ggaataaagtgcaggacaat

SEQ ID NO: 3169 - DNA, 20 bp, Artificial Sequence
  Synthetic
gacaatgggtcaggtgagac

SEQ ID NO: 3170 - DNA, 20 bp, Artificial Sequence
  Synthetic
ggaaagagaagaagccacac

SEQ ID NO: 3171 - DNA, 20 bp, Artificial Sequence
  Synthetic
ggaagccagtccttctggga

SEQ ID NO: 3172 - DNA, 20 bp, Artificial Sequence
  Synthetic
gaaataataggcacaaatca

SEQ ID NO: 3173 - DNA, 20 bp, Artificial Sequence
  Synthetic
gattctctcttcagcaggtg

SEQ ID NO: 3174 - DNA, 20 bp, Artificial Sequence
  Synthetic
gtcatgatttgaggactcac

SEQ ID NO: 3175 - DNA, 20 bp, Artificial Sequence
  Synthetic
gctgaaatgagaccgattat

SEQ ID NO: 3176 - DNA, 20 bp, Artificial Sequence
  Synthetic
gcataagacagcagtaacca

SEQ ID NO: 3177 - DNA, 20 bp, Artificial Sequence
  Synthetic
gactgtgtgtgtgctctcgg

SEQ ID NO: 3178 - DNA, 20 bp, Artificial Sequence
  Synthetic
ggaggctaaggagggagtca

SEQ ID NO: 3179 - DNA, 20 bp, Artificial Sequence
  Synthetic
ggccctggaactagagtttc

SEQ ID NO: 3180 - DNA, 20 bp, Artificial Sequence
  Synthetic
gcagctgagagaggcgaaag

SEQ ID NO: 3181 - DNA, 20 bp, Artificial Sequence
  Synthetic
ggatggaaaggaaggtaacc

SEQ ID NO: 3182 - DNA, 20 bp, Artificial Sequence
  Synthetic
ggagcgaatgaatcatagtt

SEQ ID NO: 3183 - DNA, 20 bp, Artificial Sequence
  Synthetic
gcaaagcccgggagaggaat

SEQ ID NO: 3184 - DNA, 20 bp, Artificial Sequence
  Synthetic
gcccgacagggtaattaaag

SEQ ID NO: 3185 - DNA, 20 bp, Artificial Sequence
  Synthetic
gggaggaccagcatacaggg

SEQ ID NO: 3186 - DNA, 20 bp, Artificial Sequence
  Synthetic
gttaagtatctgtaggtcct

SEQ ID NO: 3187 - DNA, 20 bp, Artificial Sequence
  Synthetic
gccaggcagggacaatagga

SEQ ID NO: 3188 - DNA, 20 bp, Artificial Sequence
  Synthetic
gactgtcccaagtctggtct

SEQ ID NO: 3189 - DNA, 20 bp, Artificial Sequence
  Synthetic
gagagcgcttgtgtgggtcc

SEQ ID NO: 3190 - DNA, 20 bp, Artificial Sequence
  Synthetic
gcaggaagcatttctcctga

SEQ ID NO: 3191 - DNA, 20 bp, Artificial Sequence
  Synthetic
ggactgtcccaagtctggtc

SEQ ID NO: 3192 - DNA, 20 bp, Artificial Sequence
  Synthetic
gaaagtgtaaggtgaagaga

SEQ ID NO: 3193 - DNA, 20 bp, Artificial Sequence
  Synthetic
ggtctagccgtcacatggtg

SEQ ID NO: 3194 - DNA, 20 bp, Artificial Sequence
  Synthetic
gtgttattcagggcaaggtt

SEQ ID NO: 3195 - DNA, 20 bp, Artificial Sequence
  Synthetic
gtggagtgtgtggccagcag

SEQ ID NO: 3196 - DNA, 20 bp, Artificial Sequence
  Synthetic
gagtctccagtgtctggagt

SEQ ID NO: 3197 - DNA, 20 bp, Artificial Sequence
  Synthetic
gtaatagccaaagggactgg

SEQ ID NO: 3198 - DNA, 20 bp, Artificial Sequence
  Synthetic
ggaagtctcttctacaatat

SEQ ID NO: 3199 - DNA, 20 bp, Artificial Sequence
  Synthetic
gcacagccttggagagaggt

SEQ ID NO: 3200 - DNA, 20 bp, Artificial Sequence
  Synthetic
gctagacaaagttgggacac

SEQ ID NO: 3201 - DNA, 20 bp, Artificial Sequence
  Synthetic
gcaaggagggtttatagact

SEQ ID NO: 3202 - DNA, 20 bp, Artificial Sequence
  Synthetic
ggaggagagagagagagggt

SEQ ID NO: 3203 - DNA, 20 bp, Artificial Sequence
  Synthetic
gacttggagaagggcagggt

SEQ ID NO: 3204 - DNA, 20 bp, Artificial Sequence
  Synthetic
gagcacttcgcagacgtagg

SEQ ID NO: 3205 - DNA, 20 bp, Artificial Sequence
  Synthetic
gcaacagaatcttctgtttc

SEQ ID NO: 3206 - DNA, 20 bp, Artificial Sequence
  Synthetic
gctctgattcttcaggtaga

SEQ ID NO: 3207 - DNA, 20 bp, Artificial Sequence
  Synthetic
gaacatctgcaagtcaacat

SEQ ID NO: 3208 - DNA, 20 bp, Artificial Sequence
  Synthetic
ggctaagggagggaaccagg

SEQ ID NO: 3209 - DNA, 20 bp, Artificial Sequence
  Synthetic
ggtgataagataatacatct

SEQ ID NO: 3210 - DNA, 20 bp, Artificial Sequence
  Synthetic
ggagattagcattgtcggaa

SEQ ID NO: 3211 - DNA, 20 bp, Artificial Sequence
  Synthetic
gcgtcctgtagaggagagag

SEQ ID NO: 3212 - DNA, 20 bp, Artificial Sequence
  Synthetic
gtgttgcacagaaggaagag

SEQ ID NO: 3213 - DNA, 20 bp, Artificial Sequence
  Synthetic
gagaaatccacgtctgaaga

SEQ ID NO: 3214 - DNA, 20 bp, Artificial Sequence
  Synthetic
ggttgcagagagaatgagaa

SEQ ID NO: 3215 - DNA, 20 bp, Artificial Sequence
  Synthetic
gaaggagaaccggccaagcg

SEQ ID NO: 3216 - DNA, 20 bp, Artificial Sequence
  Synthetic
gagattaccctacaacctgc

SEQ ID NO: 3217 - DNA, 20 bp, Artificial Sequence
  Synthetic
gactaccgaagtctctaaat

SEQ ID NO: 3218 - DNA, 20 bp, Artificial Sequence
  Synthetic
gtaattacatctcatttcgg

SEQ ID NO: 3219 - DNA, 20 bp, Artificial Sequence
  Synthetic
gtagcaggcacggaaggtct

SEQ ID NO: 3220 - DNA, 20 bp, Artificial Sequence
  Synthetic
gctgctggagtccaaggtca

SEQ ID NO: 3221 - DNA, 20 bp, Artificial Sequence
  Synthetic
ggtctaggattagtcttgat

SEQ ID NO: 3222 - DNA, 20 bp, Artificial Sequence
  Synthetic
gcgtagtgggaatgcggcta

SEQ ID NO: 3223 - DNA, 20 bp, Artificial Sequence
  Synthetic
ggctccggttctcaaacaga

SEQ ID NO: 3224 - DNA, 20 bp, Artificial Sequence
  Synthetic
gtgataagcgctaaggagcc

SEQ ID NO: 3225 - DNA, 20 bp, Artificial Sequence
  Synthetic
gctgtggtcacgtgggaacc

SEQ ID NO: 3226 - DNA, 20 bp, Artificial Sequence
  Synthetic
gggagcttggcacaattcca

SEQ ID NO: 3227 - DNA, 20 bp, Artificial Sequence
  Synthetic
gacttgaggatccgtgaatg

SEQ ID NO: 3228 - DNA, 20 bp, Artificial Sequence
  Synthetic
gaactacaagttgctggaag

SEQ ID NO: 3229 - DNA, 20 bp, Artificial Sequence
  Synthetic
gggaaggacagtgggtagca

SEQ ID NO: 3230 - DNA, 20 bp, Artificial Sequence
  Synthetic
gacagggtcccagcagtact

SEQ ID NO: 3231 - DNA, 20 bp, Artificial Sequence
  Synthetic
gggcttcagtgcaggttgga

SEQ ID NO: 3232 - DNA, 20 bp, Artificial Sequence
  Synthetic
gatgtcatttctggaagtct

SEQ ID NO: 3233 - DNA, 20 bp, Artificial Sequence
  Synthetic
gtgtgtgggtgacagaggga

SEQ ID NO: 3234 - DNA, 20 bp, Artificial Sequence
  Synthetic
gggaaagcagccagaggcac

SEQ ID NO: 3235 - DNA, 20 bp, Artificial Sequence
  Synthetic
gcccacacaggcttcccttg

SEQ ID NO: 3236 - DNA, 20 bp, Artificial Sequence
  Synthetic
gcaggaagaaaggcccgcgt

SEQ ID NO: 3237 - DNA, 20 bp, Artificial Sequence
  Synthetic
gatgactgagaaagagagtt

SEQ ID NO: 3238 - DNA, 20 bp, Artificial Sequence
  Synthetic
gaagcttgagtgagccgggt

SEQ ID NO: 3239 - DNA, 20 bp, Artificial Sequence
  Synthetic
gggaggttagtgatggaagc

SEQ ID NO: 3240 - DNA, 20 bp, Artificial Sequence
  Synthetic
gatgagcaagggagaagaga

SEQ ID NO: 3241 - DNA, 20 bp, Artificial Sequence
  Synthetic
gccttctagcagtcagtttg

SEQ ID NO: 3242 - DNA, 20 bp, Artificial Sequence
  Synthetic
ggtctcctaggcctaggcga

SEQ ID NO: 3243 - DNA, 20 bp, Artificial Sequence
  Synthetic
gaagtctacccaagttcacc

SEQ ID NO: 3244 - DNA, 20 bp, Artificial Sequence
  Synthetic
gagaccttgacctttagttt

SEQ ID NO: 3245 - DNA, 20 bp, Artificial Sequence
  Synthetic
gctcagaagccgaagatccc

SEQ ID NO: 3246 - DNA, 20 bp, Artificial Sequence
  Synthetic
gctgttggaaacctctgccc

SEQ ID NO: 3247 - DNA, 20 bp, Artificial Sequence
  Synthetic
gcatcccgaaagaggaaatt

SEQ ID NO: 3248 - DNA, 20 bp, Artificial Sequence
  Synthetic
gaaatggactttctcccttt

SEQ ID NO: 3249 - DNA, 20 bp, Artificial Sequence
  Synthetic
gtttccctggagtgtcacta

SEQ ID NO: 3250 - DNA, 20 bp, Artificial Sequence
  Synthetic
ggaccctctttctactggga

SEQ ID NO: 3251 - DNA, 20 bp, Artificial Sequence
  Synthetic
gccttacaactcaggtccag

SEQ ID NO: 3252 - DNA, 20 bp, Artificial Sequence
  Synthetic
gcaagccagatgtcaagaaa

SEQ ID NO: 3253 - DNA, 20 bp, Artificial Sequence
  Synthetic
gaaacatggtgcacagagga

SEQ ID NO: 3254 - DNA, 20 bp, Artificial Sequence
  Synthetic
gctctttcctctaacagccc

SEQ ID NO: 3255 - DNA, 20 bp, Artificial Sequence
  Synthetic
gtcatcaaagaaagaatggc

SEQ ID NO: 3256 - DNA, 20 bp, Artificial Sequence
  Synthetic
gggtacatgatcaccatgct

SEQ ID NO: 3257 - DNA, 20 bp, Artificial Sequence
  Synthetic
gctgacatttctggccagag

SEQ ID NO: 3258 - DNA, 20 bp, Artificial Sequence
  Synthetic
gcgagctcgggagacgaaag

SEQ ID NO: 3259 - DNA, 20 bp, Artificial Sequence
  Synthetic
gtttgcaggttaggcaagga

SEQ ID NO: 3260 - DNA, 20 bp, Artificial Sequence
  Synthetic
gagatgggtcctcactctac

SEQ ID NO: 3261 - DNA, 20 bp, Artificial Sequence
  Synthetic
ggtggcctcacatactgtag

SEQ ID NO: 3262 - DNA, 20 bp, Artificial Sequence
  Synthetic
gagggtccagatcctctctg

SEQ ID NO: 3263 - DNA, 20 bp, Artificial Sequence
  Synthetic
gctcagtacagaactgaaca

SEQ ID NO: 3264 - DNA, 20 bp, Artificial Sequence
  Synthetic
gtgacgtgaaggcggcaaac

SEQ ID NO: 3265 - DNA, 20 bp, Artificial Sequence
  Synthetic
ggcgagacatctcagagatc

SEQ ID NO: 3266 - DNA, 20 bp, Artificial Sequence
  Synthetic
gctttgtgtgggtccttgct

SEQ ID NO: 3267 - DNA, 20 bp, Artificial Sequence
  Synthetic
gaagtggagcaaggtctcat

SEQ ID NO: 3268 - DNA, 20 bp, Artificial Sequence
  Synthetic
gtctcagacagacaggcaag

SEQ ID NO: 3269 - DNA, 20 bp, Artificial Sequence
  Synthetic
gtccagagcaggttgtccgc

SEQ ID NO: 3270 - DNA, 20 bp, Artificial Sequence
  Synthetic
ggattctctgaaactcggca

SEQ ID NO: 3271 - DNA, 20 bp, Artificial Sequence
  Synthetic
gatgatggatttaaaggagg

SEQ ID NO: 3272 - DNA, 20 bp, Artificial Sequence
  Synthetic
gcacacagccagtttgggta

SEQ ID NO: 3273 - DNA, 20 bp, Artificial Sequence
  Synthetic
ggtgaaggaagatatgtata

SEQ ID NO: 3274 - DNA, 20 bp, Artificial Sequence
  Synthetic
gagccctggacatcagctcc

SEQ ID NO: 3275 - DNA, 20 bp, Artificial Sequence
  Synthetic
gaatgaaatgaccagaggtt

SEQ ID NO: 3276 - DNA, 20 bp, Artificial Sequence
  Synthetic
gctcctgggacaggtattgc

SEQ ID NO: 3277 - DNA, 20 bp, Artificial Sequence
  Synthetic
gtttataatcatctgaggag

SEQ ID NO: 3278 - DNA, 20 bp, Artificial Sequence
  Synthetic
gggctcactcctggactatg

SEQ ID NO: 3279 - DNA, 20 bp, Artificial Sequence
  Synthetic
ggctaagttggcagcaaggc

SEQ ID NO: 3280 - DNA, 20 bp, Artificial Sequence
  Synthetic
gtgtgcttaagtatctccca

SEQ ID NO: 3281 - DNA, 20 bp, Artificial Sequence
  Synthetic
gtccacctcactagcataat

SEQ ID NO: 3282 - DNA, 20 bp, Artificial Sequence
  Synthetic
gaccttctcagagggagggc

SEQ ID NO: 3283 - DNA, 20 bp, Artificial Sequence
  Synthetic
ggtattgcgggagaaaggca

SEQ ID NO: 3284 - DNA, 20 bp, Artificial Sequence
  Synthetic
gaaggacggctcccacacac

SEQ ID NO: 3285 - DNA, 20 bp, Artificial Sequence
  Synthetic
gtggaggctctgggcctaag

SEQ ID NO: 3286 - DNA, 20 bp, Artificial Sequence
  Synthetic
ggccgggagaaattccttta

SEQ ID NO: 3287 - DNA, 20 bp, Artificial Sequence
  Synthetic
ggagagacgctttcgcgaat

SEQ ID NO: 3288 - DNA, 20 bp, Artificial Sequence
  Synthetic
ggtgctaatcagtggttgtt

SEQ ID NO: 3289 - DNA, 20 bp, Artificial Sequence
  Synthetic
gtcttccgtttcctctggtg

SEQ ID NO: 3290 - DNA, 20 bp, Artificial Sequence
  Synthetic
gtctctgggcctgaaatcca

SEQ ID NO: 3291 - DNA, 20 bp, Artificial Sequence
  Synthetic
gggcaagaagggaataaaga

SEQ ID NO: 3292 - DNA, 20 bp, Artificial Sequence
  Synthetic
gtggttgttctttaatgagc

SEQ ID NO: 3293 - DNA, 20 bp, Artificial Sequence
  Synthetic
gggctggttaatttagtact

SEQ ID NO: 3294 - DNA, 20 bp, Artificial Sequence
  Synthetic
gaagggagtggtactaagcc

SEQ ID NO: 3295 - DNA, 20 bp, Artificial Sequence
  Synthetic
gagattgctcagggcttagt

SEQ ID NO: 3296 - DNA, 20 bp, Artificial Sequence
  Synthetic
gatttctgtggatcagtaaa

SEQ ID NO: 3297 - DNA, 20 bp, Artificial Sequence
  Synthetic
gccatgtcgttgaacttgaa

SEQ ID NO: 3298 - DNA, 20 bp, Artificial Sequence
  Synthetic
gagaaccaaccgatctccct

SEQ ID NO: 3299 - DNA, 20 bp, Artificial Sequence
  Synthetic
gatgttgtgcatcttgctaa

SEQ ID NO: 3300 - DNA, 20 bp, Artificial Sequence
  Synthetic
gataggtgaggctggagcag

SEQ ID NO: 3301 - DNA, 20 bp, Artificial Sequence
  Synthetic
gccagcagacttcactttag

SEQ ID NO: 3302 - DNA, 20 bp, Artificial Sequence
  Synthetic
ggactaggtgtgagagtgtg

SEQ ID NO: 3303 - DNA, 20 bp, Artificial Sequence
  Synthetic
gaagcatttctctctctacg

SEQ ID NO: 3304 - DNA, 20 bp, Artificial Sequence
  Synthetic
gttcaactaacttgcacatc

SEQ ID NO: 3305 - DNA, 20 bp, Artificial Sequence
  Synthetic
gaacagcgtgaagattcctt

SEQ ID NO: 3306 - DNA, 20 bp, Artificial Sequence
  Synthetic
gagggaaggtgggaggagga

SEQ ID NO: 3307 - DNA, 20 bp, Artificial Sequence
  Synthetic
ggaatgaagtgggtcgatta

SEQ ID NO: 3308 - DNA, 20 bp, Artificial Sequence
  Synthetic
gggtcagttgctacaacctc

SEQ ID NO: 3309 - DNA, 20 bp, Artificial Sequence
  Synthetic
gcagcctgcgaaataagggc

SEQ ID NO: 3310 - DNA, 20 bp, Artificial Sequence
  Synthetic
gagccaaagcctgttgaggg

SEQ ID NO: 3311 - DNA, 20 bp, Artificial Sequence
  Synthetic
ggtcctgctttaggctagcg

SEQ ID NO: 3312 - DNA, 20 bp, Artificial Sequence
  Synthetic
gtgatgtgcttccctttcca

SEQ ID NO: 3313 - DNA, 20 bp, Artificial Sequence
  Synthetic
gtgagctctgatttgaatct

SEQ ID NO: 3314 - DNA, 20 bp, Artificial Sequence
  Synthetic
gtggctgcaaagtcaactcc

SEQ ID NO: 3315 - DNA, 20 bp, Artificial Sequence
  Synthetic
ggatgagctgtctcgaattt

SEQ ID NO: 3316 - DNA, 20 bp, Artificial Sequence
  Synthetic
gggtgcgtgagcctcaaagt

SEQ ID NO: 3317 - DNA, 20 bp, Artificial Sequence
  Synthetic
ggttagtcaagagtgctggg

SEQ ID NO: 3318 - DNA, 20 bp, Artificial Sequence
  Synthetic
gctctgatttgaatctaggt

SEQ ID NO: 3319 - DNA, 20 bp, Artificial Sequence
  Synthetic
gactgctgaggctgattatg

SEQ ID NO: 3320 - DNA, 20 bp, Artificial Sequence
  Synthetic
ggatttggagttctacctgt

SEQ ID NO: 3321 - DNA, 20 bp, Artificial Sequence
  Synthetic
gtgtaggttatgagaggtac

SEQ ID NO: 3322 - DNA, 20 bp, Artificial Sequence
  Synthetic
gattgcgcgacggcccatct

SEQ ID NO: 3323 - DNA, 20 bp, Artificial Sequence
  Synthetic
gggctgcttagttctgggtc

SEQ ID NO: 3324 - DNA, 20 bp, Artificial Sequence
  Synthetic
gaatttactgcaattccttg

SEQ ID NO: 3325 - DNA, 20 bp, Artificial Sequence
  Synthetic
gtcctctttggagataccgc

SEQ ID NO: 3326 - DNA, 20 bp, Artificial Sequence
  Synthetic
gtttccaaataaagaccttg

SEQ ID NO: 3327 - DNA, 20 bp, Artificial Sequence
  Synthetic
gaagtccgatgggttgagtg

SEQ ID NO: 3328 - DNA, 20 bp, Artificial Sequence
  Synthetic
ggttatcaggatgctcaaac

SEQ ID NO: 3329 - DNA, 20 bp, Artificial Sequence
  Synthetic
ggttagagggacaggaaagg

SEQ ID NO: 3330 - DNA, 20 bp, Artificial Sequence
  Synthetic
gcctttctggaacagggcta

SEQ ID NO: 3331 - DNA, 20 bp, Artificial Sequence
  Synthetic
ggctctgggaaagcagaatg

SEQ ID NO: 3332 - DNA, 20 bp, Artificial Sequence
  Synthetic
gtgtccatgggtgaaagggc

SEQ ID NO: 3333 - DNA, 20 bp, Artificial Sequence
  Synthetic
ggcggtgatggtactcacag

SEQ ID NO: 3334 - DNA, 20 bp, Artificial Sequence
  Synthetic
gaggcaatacccagtttact

SEQ ID NO: 3335 - DNA, 20 bp, Artificial Sequence
  Synthetic
gattgaaataaaggcggtga

SEQ ID NO: 3336 - DNA, 20 bp, Artificial Sequence
  Synthetic
ggctctagctaaatgagaag

SEQ ID NO: 3337 - DNA, 20 bp, Artificial Sequence
  Synthetic
ggatttatgcttaagtacac

SEQ ID NO: 3338 - DNA, 20 bp, Artificial Sequence
  Synthetic
gttcctactgggagttgcaa

SEQ ID NO: 3339 - DNA, 20 bp, Artificial Sequence
  Synthetic
ggagttgcaatggcagcgga

SEQ ID NO: 3340 - DNA, 20 bp, Artificial Sequence
  Synthetic
gccttcctgcagcatctgta

SEQ ID NO: 3341 - DNA, 20 bp, Artificial Sequence
  Synthetic
gtgtacttaagcataaatcc

SEQ ID NO: 3342 - DNA, 20 bp, Artificial Sequence
  Synthetic
gaagtgggtttgcaaatggc

SEQ ID NO: 3343 - DNA, 20 bp, Artificial Sequence
  Synthetic
gggtggcatttcctagggca

SEQ ID NO: 3344 - DNA, 20 bp, Artificial Sequence
  Synthetic
gtcctcaagatcagagagcc

SEQ ID NO: 3345 - DNA, 20 bp, Artificial Sequence
  Synthetic
gggaagaaggaatcatgccg

SEQ ID NO: 3346 - DNA, 20 bp, Artificial Sequence
  Synthetic
gtgctgaaccctttatcctt

SEQ ID NO: 3347 - DNA, 20 bp, Artificial Sequence
  Synthetic
gaataggtctgggaatggaa

SEQ ID NO: 3348 - DNA, 20 bp, Artificial Sequence
  Synthetic
gcctccgccagccttaaagg

SEQ ID NO: 3349 - DNA, 20 bp, Artificial Sequence
  Synthetic
ggagccggagaggaaactgg

SEQ ID NO: 3350 - DNA, 20 bp, Artificial Sequence
  Synthetic
gtttcctctccggctccagg

SEQ ID NO: 3351 - DNA, 20 bp, Artificial Sequence
  Synthetic
gcagatttgcacaggtgcca

SEQ ID NO: 3352 - DNA, 20 bp, Artificial Sequence
  Synthetic
ggaggcgagagaatgtggga

SEQ ID NO: 3353 - DNA, 20 bp, Artificial Sequence
  Synthetic
gttccttctgctttctgaaa

SEQ ID NO: 3354 - DNA, 20 bp, Artificial Sequence
  Synthetic
gggaaagagaaagggacttg

SEQ ID NO: 3355 - DNA, 20 bp, Artificial Sequence
  Synthetic
ggagatcgcaggacccagag

SEQ ID NO: 3356 - DNA, 20 bp, Artificial Sequence
  Synthetic
gttatgaagactgagctctc

SEQ ID NO: 3357 - DNA, 20 bp, Artificial Sequence
  Synthetic
gttgcttgttcctgcaatgg

SEQ ID NO: 3358 - DNA, 20 bp, Artificial Sequence
  Synthetic
ggaaccgcatctccgagggt

SEQ ID NO: 3359 - DNA, 20 bp, Artificial Sequence
  Synthetic
ggagccgacagtgatggcca

SEQ ID NO: 3360 - DNA, 20 bp, Artificial Sequence
  Synthetic
gttcttacttaccaggctca

SEQ ID NO: 3361 - DNA, 20 bp, Artificial Sequence
  Synthetic
gcagtgggttcttacttacc

SEQ ID NO: 3362 - DNA, 20 bp, Artificial Sequence
  Synthetic
ggttcctgcaggcctctctg

SEQ ID NO: 3363 - DNA, 20 bp, Artificial Sequence
  Synthetic
gaaggcggagctaagaactg

SEQ ID NO: 3364 - DNA, 20 bp, Artificial Sequence
  Synthetic
gtttagtaaaggagagaaac

SEQ ID NO: 3365 - DNA, 20 bp, Artificial Sequence
  Synthetic
gaattgtacaggcacatgga

SEQ ID NO: 3366 - DNA, 20 bp, Artificial Sequence
  Synthetic
ggaacatggagaactctggc

SEQ ID NO: 3367 - DNA, 20 bp, Artificial Sequence
  Synthetic
gcgccgagaaaccgaagtgt

SEQ ID NO: 3368 - DNA, 20 bp, Artificial Sequence
  Synthetic
gtgtcctaggaaggaaagag

SEQ ID NO: 3369 - DNA, 20 bp, Artificial Sequence
  Synthetic
gtaattcccatctctgtgtt

SEQ ID NO: 3370 - DNA, 20 bp, Artificial Sequence
  Synthetic
ggcgtagcttatccgcaggc

SEQ ID NO: 3371 - DNA, 20 bp, Artificial Sequence
  Synthetic
gctttccgacttgtccgtca

SEQ ID NO: 3372 - DNA, 20 bp, Artificial Sequence
  Synthetic
ggagctcaaatgtgtgacga

SEQ ID NO: 3373 - DNA, 20 bp, Artificial Sequence
  Synthetic
gtgtcagtttcaggaccctt

SEQ ID NO: 3374 - DNA, 20 bp, Artificial Sequence
  Synthetic
gaaagaggaagtgcctgcct

SEQ ID NO: 3375 - DNA, 20 bp, Artificial Sequence
  Synthetic
gcagcgatgccggtgacatg

SEQ ID NO: 3376 - DNA, 20 bp, Artificial Sequence
  Synthetic
gggtgagggaccagcttcca

SEQ ID NO: 3377 - DNA, 20 bp, Artificial Sequence
  Synthetic
ggctctcctgcacatgagga

SEQ ID NO: 3378 - DNA, 20 bp, Artificial Sequence
  Synthetic
gtccacagaggcaggagagg

SEQ ID NO: 3379 - DNA, 20 bp, Artificial Sequence
  Synthetic
ggtcttgccaagtgcctgca

SEQ ID NO: 3380 - DNA, 20 bp, Artificial Sequence
  Synthetic
gctctgattggtgagcagcc

SEQ ID NO: 3381 - DNA, 20 bp, Artificial Sequence
  Synthetic
gtgcatccgaagccttggat

SEQ ID NO: 3382 - DNA, 20 bp, Artificial Sequence
  Synthetic
gcagagtgcagagaagccca

SEQ ID NO: 3383 - DNA, 20 bp, Artificial Sequence
  Synthetic
gcgagtccaatccaaggctt

SEQ ID NO: 3384 - DNA, 20 bp, Artificial Sequence
  Synthetic
ggattggactcgctgagacc

SEQ ID NO: 3385 - DNA, 20 bp, Artificial Sequence
  Synthetic
gcactacagagcaaagcgat

SEQ ID NO: 3386 - DNA, 20 bp, Artificial Sequence
  Synthetic
ggattcgcatggaaagggtt

SEQ ID NO: 3387 - DNA, 20 bp, Artificial Sequence
  Synthetic
gtctcagcgagtccaatcca

SEQ ID NO: 3388 - DNA, 20 bp, Artificial Sequence
  Synthetic
gattcgcatggaaagggttt

SEQ ID NO: 3389 - DNA, 20 bp, Artificial Sequence
  Synthetic
gaatttatggtgcctgagat

SEQ ID NO: 3390 - DNA, 20 bp, Artificial Sequence
  Synthetic
gcaggtcgaggtggcgaagt

SEQ ID NO: 3391 - DNA, 20 bp, Artificial Sequence
  Synthetic
gactcgagatcacaggacgc

SEQ ID NO: 3392 - DNA, 20 bp, Artificial Sequence
  Synthetic
ggaaatacacaaaggctgga

SEQ ID NO: 3393 - DNA, 20 bp, Artificial Sequence
  Synthetic
gacattcaaggagacctcaa

SEQ ID NO: 3394 - DNA, 20 bp, Artificial Sequence
  Synthetic
gcctttgtactgtgactgtg

SEQ ID NO: 3395 - DNA, 20 bp, Artificial Sequence
  Synthetic
gacacattgaagcctaggta

SEQ ID NO: 3396 - DNA, 20 bp, Artificial Sequence
  Synthetic
ggcctttgtactgtgactgt

SEQ ID NO: 3397 - DNA, 20 bp, Artificial Sequence
  Synthetic
gggcctttgtactgtgactg

SEQ ID NO: 3398 - DNA, 20 bp, Artificial Sequence
  Synthetic
gaaggtctctgtgaataatg

SEQ ID NO: 3399 - DNA, 20 bp, Artificial Sequence
  Synthetic
gctgacctggatcggtcaca

SEQ ID NO: 3400 - DNA, 20 bp, Artificial Sequence
  Synthetic
ggtcgttcaaccctggccca

SEQ ID NO: 3401 - DNA, 20 bp, Artificial Sequence
  Synthetic
gatctgctaccatgacgtca

SEQ ID NO: 3402 - DNA, 20 bp, Artificial Sequence
  Synthetic
gcaggccacctttagaacag

SEQ ID NO: 3403 - DNA, 20 bp, Artificial Sequence
  Synthetic
ggactgaaagagaatggagg

SEQ ID NO: 3404 - DNA, 20 bp, Artificial Sequence
  Synthetic
ggagcatgcatatgcaatta

SEQ ID NO: 3405 - DNA, 20 bp, Artificial Sequence
  Synthetic
gagaggctaacagacagtgc

SEQ ID NO: 3406 - DNA, 20 bp, Artificial Sequence
  Synthetic
ggcctccttaaagttggaca

SEQ ID NO: 3407 - DNA, 20 bp, Artificial Sequence
  Synthetic
gtacagcacagcttcaggct

SEQ ID NO: 3408 - DNA, 20 bp, Artificial Sequence
  Synthetic
gagtgtgaggagctgaggag

SEQ ID NO: 3409 - DNA, 20 bp, Artificial Sequence
  Synthetic
gacgctgacacagaccagcc

SEQ ID NO: 3410 - DNA, 20 bp, Artificial Sequence
  Synthetic
gaacgttctgaacccgccct

SEQ ID NO: 3411 - DNA, 20 bp, Artificial Sequence
  Synthetic
ggtctctttctcacttctcc

SEQ ID NO: 3412 - DNA, 20 bp, Artificial Sequence
  Synthetic
gcgaaggaatccaactcagc

SEQ ID NO: 3413 - DNA, 20 bp, Artificial Sequence
  Synthetic
ggctcaagaactgaaagggt

SEQ ID NO: 3414 - DNA, 20 bp, Artificial Sequence
  Synthetic
gcataggtagagcagctagt

SEQ ID NO: 3415 - DNA, 20 bp, Artificial Sequence
  Synthetic
gatccagaggtgggacccag

SEQ ID NO: 3416 - DNA, 20 bp, Artificial Sequence
  Synthetic
ggctcagaccgttagacgcc

SEQ ID NO: 3417 - DNA, 20 bp, Artificial Sequence
  Synthetic
gaccagcccgggaaaggaaa

SEQ ID NO: 3418 - DNA, 20 bp, Artificial Sequence
  Synthetic
gacgtgcccagctgcagtaa

SEQ ID NO: 3419 - DNA, 20 bp, Artificial Sequence
  Synthetic
gtcttaagtttcgagtgatt

SEQ ID NO: 3420 - DNA, 20 bp, Artificial Sequence
  Synthetic
gtaaccctgcctcattcttg

SEQ ID NO: 3421 - DNA, 20 bp, Artificial Sequence
  Synthetic
gggtggtgggaaggtgtgaa

SEQ ID NO: 3422 - DNA, 20 bp, Artificial Sequence
  Synthetic
gggcatccctgaattgccat

SEQ ID NO: 3423 - DNA, 20 bp, Artificial Sequence
  Synthetic
gcagccaatgcctgtagggt

SEQ ID NO: 3424 - DNA, 20 bp, Artificial Sequence
  Synthetic
gcctccttagagagaagccc

SEQ ID NO: 3425 - DNA, 20 bp, Artificial Sequence
  Synthetic
gatcccgcccttactgcagc

SEQ ID NO: 3426 - DNA, 20 bp, Artificial Sequence
  Synthetic
gcctcattatcccaacagaa

SEQ ID NO: 3427 - DNA, 20 bp, Artificial Sequence
  Synthetic
gctcattatcatccagccca

SEQ ID NO: 3428 - DNA, 20 bp, Artificial Sequence
  Synthetic
gctgataccgaggagaggcg

SEQ ID NO: 3429 - DNA, 20 bp, Artificial Sequence
  Synthetic
ggttctatgtatgcccgtgg

SEQ ID NO: 3430 - DNA, 20 bp, Artificial Sequence
  Synthetic
gctttcttaatcaatcagcc

SEQ ID NO: 3431 - DNA, 20 bp, Artificial Sequence
  Synthetic
gcttacctgtgatgtgatac

SEQ ID NO: 3432 - DNA, 20 bp, Artificial Sequence
  Synthetic
ggcgtggaaaggactgaatg

SEQ ID NO: 3433 - DNA, 20 bp, Artificial Sequence
  Synthetic
gtgcaaagtgtgcaaaggga

SEQ ID NO: 3434 - DNA, 20 bp, Artificial Sequence
  Synthetic
gttctatgtatgcccgtgga

SEQ ID NO: 3435 - DNA, 20 bp, Artificial Sequence
  Synthetic
gcaggcaagagagagtcttt

SEQ ID NO: 3436 - DNA, 20 bp, Artificial Sequence
  Synthetic
gaacgcatgacgtcccaccc

SEQ ID NO: 3437 - DNA, 20 bp, Artificial Sequence
  Synthetic
gagtgtgcaaagtgtgcaaa

SEQ ID NO: 3438 - DNA, 20 bp, Artificial Sequence
  Synthetic
gttacatccatctatgaaac

SEQ ID NO: 3439 - DNA, 20 bp, Artificial Sequence
  Synthetic
gggaatgacgctcgggccaa

SEQ ID NO: 3440 - DNA, 20 bp, Artificial Sequence
  Synthetic
gggactctgagccttgtttg

SEQ ID NO: 3441 - DNA, 20 bp, Artificial Sequence
  Synthetic
ggtggcactgtcctcctgat

SEQ ID NO: 3442 - DNA, 20 bp, Artificial Sequence
  Synthetic
gagcttaaaggtagcagtat

SEQ ID NO: 3443 - DNA, 20 bp, Artificial Sequence
  Synthetic
gccttctctatagacagggt

SEQ ID NO: 3444 - DNA, 20 bp, Artificial Sequence
  Synthetic
gaggagcatgaagcccatcc

SEQ ID NO: 3445 - DNA, 20 bp, Artificial Sequence
  Synthetic
gccttctgaccctccaaagg

SEQ ID NO: 3446 - DNA, 20 bp, Artificial Sequence
  Synthetic
gcctctaaggatttagaggg

SEQ ID NO: 3447 - DNA, 20 bp, Artificial Sequence
  Synthetic
gacgctcgggccaatgggaa

SEQ ID NO: 3448 - DNA, 20 bp, Artificial Sequence
  Synthetic
ggaaggctctgggcctcaaa

SEQ ID NO: 3449 - DNA, 20 bp, Artificial Sequence
  Synthetic
gtgcacacgccagcgtggaa

SEQ ID NO: 3450 - DNA, 20 bp, Artificial Sequence
  Synthetic
gctagactggtggtaaggaa

SEQ ID NO: 3451 - DNA, 20 bp, Artificial Sequence
  Synthetic
gctcagggttaacgcctgtc

SEQ ID NO: 3452 - DNA, 20 bp, Artificial Sequence
  Synthetic
gaggagtgagccacagggac

SEQ ID NO: 3453 - DNA, 20 bp, Artificial Sequence
  Synthetic
gcgccaacccaaagtttgca

SEQ ID NO: 3454 - DNA, 20 bp, Artificial Sequence
  Synthetic
ggctgcaaactttgtgtgcg

SEQ ID NO: 3455 - DNA, 20 bp, Artificial Sequence
  Synthetic
gggctttctgatatcatctt

SEQ ID NO: 3456 - DNA, 20 bp, Artificial Sequence
  Synthetic
gctggtggaaaggaagacac

SEQ ID NO: 3457 - DNA, 20 bp, Artificial Sequence
  Synthetic
gttggcctaggttccttgct

SEQ ID NO: 3458 - DNA, 20 bp, Artificial Sequence
  Synthetic
ggcagtggatctgtagctaa

SEQ ID NO: 3459 - DNA, 20 bp, Artificial Sequence
  Synthetic
ggttatccaatctttcttct

SEQ ID NO: 3460 - DNA, 20 bp, Artificial Sequence
  Synthetic
gggaagttctctctctggcc

SEQ ID NO: 3461 - DNA, 20 bp, Artificial Sequence
  Synthetic
gctccgccggatcggtttct

SEQ ID NO: 3462 - DNA, 20 bp, Artificial Sequence
  Synthetic
gccacatccacccgagtcaa

SEQ ID NO: 3463 - DNA, 20 bp, Artificial Sequence
  Synthetic
gtcgattcttaaggaaccgg

SEQ ID NO: 3464 - DNA, 20 bp, Artificial Sequence
  Synthetic
gcagtgcacaaacacacgtt

SEQ ID NO: 3465 - DNA, 20 bp, Artificial Sequence
  Synthetic
ggtttctcagaaatgttgtt

SEQ ID NO: 3466 - DNA, 20 bp, Artificial Sequence
  Synthetic
gaggatctgggacactgagc

SEQ ID NO: 3467 - DNA, 20 bp, Artificial Sequence
  Synthetic
gtcagatgacaaggtttgtc

SEQ ID NO: 3468 - DNA, 20 bp, Artificial Sequence
  Synthetic
gcactagttaatgtgagctc

SEQ ID NO: 3469 - DNA, 20 bp, Artificial Sequence
  Synthetic
gcatttctaacgatgccaac

SEQ ID NO: 3470 - DNA, 20 bp, Artificial Sequence
  Synthetic
gaggaactgtacactttcac

SEQ ID NO: 3471 - DNA, 20 bp, Artificial Sequence
  Synthetic
gggtagagggactaagtcaa

SEQ ID NO: 3472 - DNA, 20 bp, Artificial Sequence
  Synthetic
gttccaggtccttccgtgtc

SEQ ID NO: 3473 - DNA, 20 bp, Artificial Sequence
  Synthetic
gaaagcatttgacaggaggg

SEQ ID NO: 3474 - DNA, 20 bp, Artificial Sequence
  Synthetic
gacgtctacttgagaaacac

SEQ ID NO: 3475 - DNA, 20 bp, Artificial Sequence
  Synthetic
gagaaagcctcttccagatg

SEQ ID NO: 3476 - DNA, 20 bp, Artificial Sequence
  Synthetic
gaaagcacacggcagggaat

SEQ ID NO: 3477 - DNA, 20 bp, Artificial Sequence
  Synthetic
gcagagaataggcttggact

SEQ ID NO: 3478 - DNA, 20 bp, Artificial Sequence
  Synthetic
gaactcttgtcagcctcatc

SEQ ID NO: 3479 - DNA, 20 bp, Artificial Sequence
  Synthetic
gaagccctggtcttcacaaa

SEQ ID NO: 3480 - DNA, 20 bp, Artificial Sequence
  Synthetic
gagaatgcagagaataggct

SEQ ID NO: 3481 - DNA, 20 bp, Artificial Sequence
  Synthetic
gtgaagaccagggcttcaca

SEQ ID NO: 3482 - DNA, 20 bp, Artificial Sequence
  Synthetic
gtaacccagtgtaaacacac

SEQ ID NO: 3483 - DNA, 20 bp, Artificial Sequence
  Synthetic
ggtcatgcaaggaggcttga

SEQ ID NO: 3484 - DNA, 20 bp, Artificial Sequence
  Synthetic
gtctgtagctcattctgctc

SEQ ID NO: 3485 - DNA, 20 bp, Artificial Sequence
  Synthetic
gtgaatggtaagctcttcta

SEQ ID NO: 3486 - DNA, 20 bp, Artificial Sequence
  Synthetic
ggagtagatcctaaggaccc

SEQ ID NO: 3487 - DNA, 20 bp, Artificial Sequence
  Synthetic
ggcttctttcacttgtccca

SEQ ID NO: 3488 - DNA, 20 bp, Artificial Sequence
  Synthetic
gactcacctggacttggctg

SEQ ID NO: 3489 - DNA, 20 bp, Artificial Sequence
  Synthetic
gaacaggtagaagactcacc

SEQ ID NO: 3490 - DNA, 20 bp, Artificial Sequence
  Synthetic
gagggaatagtggtggtaag

SEQ ID NO: 3491 - DNA, 20 bp, Artificial Sequence
  Synthetic
gccaataagaagacataaca

SEQ ID NO: 3492 - DNA, 20 bp, Artificial Sequence
  Synthetic
gtgagtcttctacctgttcc

SEQ ID NO: 3493 - DNA, 20 bp, Artificial Sequence
  Synthetic
ggtggatcgcccacgtgatg

SEQ ID NO: 3494 - DNA, 20 bp, Artificial Sequence
  Synthetic
ggtccggagctcttcatatc

SEQ ID NO: 3495 - DNA, 20 bp, Artificial Sequence
  Synthetic
gggaacaccggcaaggtaag

SEQ ID NO: 3496 - DNA, 20 bp, Artificial Sequence
  Synthetic
gcacatgcggttgtcaacac

SEQ ID NO: 3497 - DNA, 20 bp, Artificial Sequence
  Synthetic
gccaagaggacgctagtgac

SEQ ID NO: 3498 - DNA, 20 bp, Artificial Sequence
  Synthetic
gtggatcgcccacgtgatgc

SEQ ID NO: 3499 - DNA, 20 bp, Artificial Sequence
  Synthetic
gatggaagagccgagcgaag

SEQ ID NO: 3500 - DNA, 20 bp, Artificial Sequence
  Synthetic
gatatgaagagctccggacc

SEQ ID NO: 3501 - DNA, 20 bp, Artificial Sequence
  Synthetic
gacctgaggtgcttctgatc

SEQ ID NO: 3502 - DNA, 20 bp, Artificial Sequence
  Synthetic
gcctgtggagttgacccaag

SEQ ID NO: 3503 - DNA, 20 bp, Artificial Sequence
  Synthetic
ggctccctctgaggacagat

SEQ ID NO: 3504 - DNA, 20 bp, Artificial Sequence
  Synthetic
ggtgtccacttgggacactt

SEQ ID NO: 3505 - DNA, 20 bp, Artificial Sequence
  Synthetic
ggaccgcagctgcatccata

SEQ ID NO: 3506 - DNA, 20 bp, Artificial Sequence
  Synthetic
gggtgagctttgctcttctc

SEQ ID NO: 3507 - DNA, 20 bp, Artificial Sequence
  Synthetic
gaaggaggagacccacaggt

SEQ ID NO: 3508 - DNA, 20 bp, Artificial Sequence
  Synthetic
gacagggacgcgtccatgaa

SEQ ID NO: 3509 - DNA, 20 bp, Artificial Sequence
  Synthetic
gtacatctgccgcacctacc

SEQ ID NO: 3510 - DNA, 20 bp, Artificial Sequence
  Synthetic
gagcagcagaccgtgaaggg

SEQ ID NO: 3511 - DNA, 20 bp, Artificial Sequence
  Synthetic
gttctagctagcggtgacca

SEQ ID NO: 3512 - DNA, 20 bp, Artificial Sequence
  Synthetic
gagcgattcgcagagggtgc

SEQ ID NO: 3513 - DNA, 20 bp, Artificial Sequence
  Synthetic
gacgaaggagtggtgcgcac

SEQ ID NO: 3514 - DNA, 20 bp, Artificial Sequence
  Synthetic
gctgggagtctgcagaaaga

SEQ ID NO: 3515 - DNA, 20 bp, Artificial Sequence
  Synthetic
gctttcagtagggtctctgt

SEQ ID NO: 3516 - DNA, 20 bp, Artificial Sequence
  Synthetic
gcacgggacaccaggaagtg

SEQ ID NO: 3517 - DNA, 20 bp, Artificial Sequence
  Synthetic
gcgaaagatgcccgagatgc

SEQ ID NO: 3518 - DNA, 20 bp, Artificial Sequence
  Synthetic
gagacactctgaccagccaa

SEQ ID NO: 3519 - DNA, 20 bp, Artificial Sequence
  Synthetic
gcaggtgtaactaaatgtaa

SEQ ID NO: 3520 - DNA, 20 bp, Artificial Sequence
  Synthetic
gaacttccgcacctccaggc

SEQ ID NO: 3521 - DNA, 20 bp, Artificial Sequence
  Synthetic
gttctgagcacttaagccac

SEQ ID NO: 3522 - DNA, 20 bp, Artificial Sequence
  Synthetic
gtcttctcttccctagaaca

SEQ ID NO: 3523 - DNA, 20 bp, Artificial Sequence
  Synthetic
gattccacagacagggataa

SEQ ID NO: 3524 - DNA, 20 bp, Artificial Sequence
  Synthetic
gtggtggccgtagggaagga

SEQ ID NO: 3525 - DNA, 20 bp, Artificial Sequence
  Synthetic
gcctttcctctccctgttct

SEQ ID NO: 3526 - DNA, 20 bp, Artificial Sequence
  Synthetic
gctagaccgtgtgggaaaga

SEQ ID NO: 3527 - DNA, 20 bp, Artificial Sequence
  Synthetic
gcaggaacgttgttagttcc

SEQ ID NO: 3528 - DNA, 20 bp, Artificial Sequence
  Synthetic
gaactcacctgggtggagtt

SEQ ID NO: 3529 - DNA, 20 bp, Artificial Sequence
  Synthetic
ggtgcttggaagtcacagct

SEQ ID NO: 3530 - DNA, 20 bp, Artificial Sequence
  Synthetic
ggtgtgacaaagacttgaaa

SEQ ID NO: 3531 - DNA, 20 bp, Artificial Sequence
  Synthetic
ggtcacttgtgaaactttca

SEQ ID NO: 3532 - DNA, 20 bp, Artificial Sequence
  Synthetic
gtcagattaccaactggcca

SEQ ID NO: 3533 - DNA, 20 bp, Artificial Sequence
  Synthetic
gaagagggcgcctaactcca

SEQ ID NO: 3534 - DNA, 20 bp, Artificial Sequence
  Synthetic
gatcttccatgaaaggatga

SEQ ID NO: 3535 - DNA, 20 bp, Artificial Sequence
  Synthetic
gttcccagcatgcctgtagg

SEQ ID NO: 3536 - DNA, 20 bp, Artificial Sequence
  Synthetic
gagcaattccgtggttgacc

SEQ ID NO: 3537 - DNA, 20 bp, Artificial Sequence
  Synthetic
gagacccaactcttcagagc

SEQ ID NO: 3538 - DNA, 20 bp, Artificial Sequence
  Synthetic
gtggttgtcagggctcacag

SEQ ID NO: 3539 - DNA, 20 bp, Artificial Sequence
  Synthetic
gaagtgatagtttaacagtg

SEQ ID NO: 3540 - DNA, 20 bp, Artificial Sequence
  Synthetic
gttgccatgattgaaacttt

SEQ ID NO: 3541 - DNA, 20 bp, Artificial Sequence
  Synthetic
gaaacaaggtctccgtctct

SEQ ID NO: 3542 - DNA, 20 bp, Artificial Sequence
  Synthetic
ggcagactggttaaagacat

SEQ ID NO: 3543 - DNA, 20 bp, Artificial Sequence
  Synthetic
gaactttatagagccggagg

SEQ ID NO: 3544 - DNA, 20 bp, Artificial Sequence
  Synthetic
gttcttagtggtcagctaga

SEQ ID NO: 3545 - DNA, 20 bp, Artificial Sequence
  Synthetic
ggaggagctgaagaaagcca

SEQ ID NO: 3546 - DNA, 20 bp, Artificial Sequence
  Synthetic
gcttcggactagagcccacc

SEQ ID NO: 3547 - DNA, 20 bp, Artificial Sequence
  Synthetic
ggtatgctgtttgcaaggaa

SEQ ID NO: 3548 - DNA, 20 bp, Artificial Sequence
  Synthetic
gcaattgtgaactggcaggc

SEQ ID NO: 3549 - DNA, 20 bp, Artificial Sequence
  Synthetic
ggcaggagggagcttctgtg

SEQ ID NO: 3550 - DNA, 20 bp, Artificial Sequence
  Synthetic
gatctctgagttgtcccatc

SEQ ID NO: 3551 - DNA, 20 bp, Artificial Sequence
  Synthetic
gctttgcaggttctctggac

SEQ ID NO: 3552 - DNA, 20 bp, Artificial Sequence
  Synthetic
gaaggcccgtttatggaacc

SEQ ID NO: 3553 - DNA, 20 bp, Artificial Sequence
  Synthetic
gagctgtgtgccgacagggt

SEQ ID NO: 3554 - DNA, 20 bp, Artificial Sequence
  Synthetic
gtcgatggagccacactcca

SEQ ID NO: 3555 - DNA, 20 bp, Artificial Sequence
  Synthetic
gttgccttgaactgggtgtg

SEQ ID NO: 3556 - DNA, 20 bp, Artificial Sequence
  Synthetic
gctagctaaagtgaacaatg

SEQ ID NO: 3557 - DNA, 20 bp, Artificial Sequence
  Synthetic
ggaccagaaaggatgtggac

SEQ ID NO: 3558 - DNA, 20 bp, Artificial Sequence
  Synthetic
gtgacatcccaaactgagct

SEQ ID NO: 3559 - DNA, 20 bp, Artificial Sequence
  Synthetic
gtgcagggtcactacgggag

SEQ ID NO: 3560 - DNA, 20 bp, Artificial Sequence
  Synthetic
ggacatttgcttggtttcaa

SEQ ID NO: 3561 - DNA, 20 bp, Artificial Sequence
  Synthetic
gggaaagctcaggtcttccc

SEQ ID NO: 3562 - DNA, 20 bp, Artificial Sequence
  Synthetic
gatgtcaccgggcaaaggct

SEQ ID NO: 3563 - DNA, 20 bp, Artificial Sequence
  Synthetic
gtggcacttgtcaggcacac

SEQ ID NO: 3564 - DNA, 20 bp, Artificial Sequence
  Synthetic
gtgttgtgatcgactgaggg

SEQ ID NO: 3565 - DNA, 20 bp, Artificial Sequence
  Synthetic
gtccaccactcaggagactg

SEQ ID NO: 3566 - DNA, 20 bp, Artificial Sequence
  Synthetic
gaagggtttgcctcactgcc

SEQ ID NO: 3567 - DNA, 20 bp, Artificial Sequence
  Synthetic
ggctgctttggcaatgaaca

SEQ ID NO: 3568 - DNA, 20 bp, Artificial Sequence
  Synthetic
gaattccagagtcttaaggc

SEQ ID NO: 3569 - DNA, 20 bp, Artificial Sequence
  Synthetic
gctttcctcttagctacagt

SEQ ID NO: 3570 - DNA, 20 bp, Artificial Sequence
  Synthetic
gaacgtgcgtgtggagtgga

SEQ ID NO: 3571 - DNA, 20 bp, Artificial Sequence
  Synthetic
gacagcttcacgtgagggag

SEQ ID NO: 3572 - DNA, 20 bp, Artificial Sequence
  Synthetic
gtgggtagacctttagggaa

SEQ ID NO: 3573 - DNA, 20 bp, Artificial Sequence
  Synthetic
gccagtgcctcgggaagtga

SEQ ID NO: 3574 - DNA, 20 bp, Artificial Sequence
  Synthetic
gcatgccatgactgctgttc

SEQ ID NO: 3575 - DNA, 20 bp, Artificial Sequence
  Synthetic
gtgtgtaactaccgtagccc

SEQ ID NO: 3576 - DNA, 20 bp, Artificial Sequence
  Synthetic
ggtgtttgggaccctcatga

SEQ ID NO: 3577 - DNA, 20 bp, Artificial Sequence
  Synthetic
gagcaccgattctcctcaga

SEQ ID NO: 3578 - DNA, 20 bp, Artificial Sequence
  Synthetic
gcgcgagctaattgaggagc

SEQ ID NO: 3579 - DNA, 20 bp, Artificial Sequence
  Synthetic
gggagaggtgtttgttcatt

SEQ ID NO: 3580 - DNA, 20 bp, Artificial Sequence
  Synthetic
gcaggaaatctgggaaacca

SEQ ID NO: 3581 - DNA, 20 bp, Artificial Sequence
  Synthetic
gcatgtgcagggcttaacta

SEQ ID NO: 3582 - DNA, 20 bp, Artificial Sequence
  Synthetic
ggaaaccctgacctcagcag

SEQ ID NO: 3583 - DNA, 20 bp, Artificial Sequence
  Synthetic
gcctgagcagctgacactca

SEQ ID NO: 3584 - DNA, 20 bp, Artificial Sequence
  Synthetic
ggcctctaaggatgagggtg

SEQ ID NO: 3585 - DNA, 20 bp, Artificial Sequence
  Synthetic
gtggcccagggctgaatgaa

SEQ ID NO: 3586 - DNA, 20 bp, Artificial Sequence
  Synthetic
gaaggaccaccaagaagcct

SEQ ID NO: 3587 - DNA, 20 bp, Artificial Sequence
  Synthetic
gtgaacatatgcaagatgga

SEQ ID NO: 3588 - DNA, 20 bp, Artificial Sequence
  Synthetic
gcagtaagctgaggtctctg

SEQ ID NO: 3589 - DNA, 20 bp, Artificial Sequence
  Synthetic
ggcagtaagctgaggtctct

SEQ ID NO: 3590 - DNA, 20 bp, Artificial Sequence
  Synthetic
ggcaacacggcttagtcatt

SEQ ID NO: 3591 - DNA, 20 bp, Artificial Sequence
  Synthetic
ggagaattgaaacttagggt

SEQ ID NO: 3592 - DNA, 20 bp, Artificial Sequence
  Synthetic
gagaattgaaacttagggtg

SEQ ID NO: 3593 - DNA, 20 bp, Artificial Sequence
  Synthetic
gatgggcaatagctccctgc

SEQ ID NO: 3594 - DNA, 20 bp, Artificial Sequence
  Synthetic
gccataagatgcctctttat

SEQ ID NO: 3595 - DNA, 20 bp, Artificial Sequence
  Synthetic
gggttcagggatgaagcttg

SEQ ID NO: 3596 - DNA, 20 bp, Artificial Sequence
  Synthetic
gtcgtgggagactcaaagac

SEQ ID NO: 3597 - DNA, 20 bp, Artificial Sequence
  Synthetic
gggattgcgtttctacagct

SEQ ID NO: 3598 - DNA, 20 bp, Artificial Sequence
  Synthetic
gtggactccctggtcaggtc

SEQ ID NO: 3599 - DNA, 20 bp, Artificial Sequence
  Synthetic
gcaagggtgtggactcagtt

SEQ ID NO: 3600 - DNA, 20 bp, Artificial Sequence
  Synthetic
ggcctggctgctctgttctc

SEQ ID NO: 3601 - DNA, 20 bp, Artificial Sequence
  Synthetic
gaggagagctcctagagggt

SEQ ID NO: 3602 - DNA, 20 bp, Artificial Sequence
  Synthetic
gctgagaggtcgctgcctag

SEQ ID NO: 3603 - DNA, 20 bp, Artificial Sequence
  Synthetic
gtttacagctgtctgacacc

SEQ ID NO: 3604 - DNA, 20 bp, Artificial Sequence
  Synthetic
gcaagcaagtgtgccttagc

SEQ ID NO: 3605 - DNA, 20 bp, Artificial Sequence
  Synthetic
gttgtgggagtaatgacaag

SEQ ID NO: 3606 - DNA, 20 bp, Artificial Sequence
  Synthetic
ggactctgaaacctggcgcg

SEQ ID NO: 3607 - DNA, 20 bp, Artificial Sequence
  Synthetic
gggtagatgcttggcagccc

SEQ ID NO: 3608 - DNA, 20 bp, Artificial Sequence
  Synthetic
gcttcaaggagacacctgtt

SEQ ID NO: 3609 - DNA, 20 bp, Artificial Sequence
  Synthetic
gctctacctagcaagcttca

SEQ ID NO: 3610 - DNA, 20 bp, Artificial Sequence
  Synthetic
gttggaaaccaagagcagtt

SEQ ID NO: 3611 - DNA, 20 bp, Artificial Sequence
  Synthetic
gtcacggatctggctgctgc

SEQ ID NO: 3612 - DNA, 20 bp, Artificial Sequence
  Synthetic
gctctgaagctagtagaggg

SEQ ID NO: 3613 - DNA, 20 bp, Artificial Sequence
  Synthetic
gtccaggtcccagggaacca

SEQ ID NO: 3614 - DNA, 20 bp, Artificial Sequence
  Synthetic
gctatcttcagggtgatgag

SEQ ID NO: 3615 - DNA, 20 bp, Artificial Sequence
  Synthetic
gcctcagcctggagtacagg

SEQ ID NO: 3616 - DNA, 20 bp, Artificial Sequence
  Synthetic
gaaagtcatactgaaattcc

SEQ ID NO: 3617 - DNA, 20 bp, Artificial Sequence
  Synthetic
gaacgtgctgcctgggagtt

SEQ ID NO: 3618 - DNA, 20 bp, Artificial Sequence
  Synthetic
gggttcgatgtcagcatgtg

SEQ ID NO: 3619 - DNA, 20 bp, Artificial Sequence
  Synthetic
ggtgcatcgggagttgattg

SEQ ID NO: 3620 - DNA, 20 bp, Artificial Sequence
  Synthetic
ggttggctttaaggtgagcc

SEQ ID NO: 3621 - DNA, 20 bp, Artificial Sequence
  Synthetic
gtgcctgttgggagaaagag

SEQ ID NO: 3622 - DNA, 20 bp, Artificial Sequence
  Synthetic
ggcgacagagccagattgca

SEQ ID NO: 3623 - DNA, 20 bp, Artificial Sequence
  Synthetic
gctttgtgcactgtgcctgt

SEQ ID NO: 3624 - DNA, 20 bp, Artificial Sequence
  Synthetic
ggaatggatttctttctccc

SEQ ID NO: 3625 - DNA, 20 bp, Artificial Sequence
  Synthetic
gctacttatcagaactttgc

SEQ ID NO: 3626 - DNA, 20 bp, Artificial Sequence
  Synthetic
gaagctaaggctcacgggag

SEQ ID NO: 3627 - DNA, 20 bp, Artificial Sequence
  Synthetic
gactcatttcatgctcaccg

SEQ ID NO: 3628 - DNA, 20 bp, Artificial Sequence
  Synthetic
gctctggagccttccatggg

SEQ ID NO: 3629 - DNA, 20 bp, Artificial Sequence
  Synthetic
gggaagctgccttgcacagt

SEQ ID NO: 3630 - DNA, 20 bp, Artificial Sequence
  Synthetic
ggagtcttcaagggagcgaa

SEQ ID NO: 3631 - DNA, 20 bp, Artificial Sequence
  Synthetic
gcaaagtccaggtgaggagg

SEQ ID NO: 3632 - DNA, 20 bp, Artificial Sequence
  Synthetic
gatggtccggaagggagaag

SEQ ID NO: 3633 - DNA, 20 bp, Artificial Sequence
  Synthetic
gccctcacaatgctatcctt

SEQ ID NO: 3634 - DNA, 20 bp, Artificial Sequence
  Synthetic
gcctgggtctttgtaatctg

SEQ ID NO: 3635 - DNA, 20 bp, Artificial Sequence
  Synthetic
gagtaagctcccgcccagaa

SEQ ID NO: 3636 - DNA, 20 bp, Artificial Sequence
  Synthetic
ggcgaaagctgatcattagc

SEQ ID NO: 3637 - DNA, 20 bp, Artificial Sequence
  Synthetic
gggatgtgattgtcatcctg

SEQ ID NO: 3638 - DNA, 20 bp, Artificial Sequence
  Synthetic
gggccgttcgggaacacaaa

SEQ ID NO: 3639 - DNA, 20 bp, Artificial Sequence
  Synthetic
gattacgtcatccagaggag

SEQ ID NO: 3640 - DNA, 20 bp, Artificial Sequence
  Synthetic
gcaagcagtttgctcggttg

SEQ ID NO: 3641 - DNA, 20 bp, Artificial Sequence
  Synthetic
gcctcttctcgtcgtctgcc

SEQ ID NO: 3642 - DNA, 20 bp, Artificial Sequence
  Synthetic
gaagccactgtggagcgtgg

SEQ ID NO: 3643 - DNA, 20 bp, Artificial Sequence
  Synthetic
gtgttccgagaactctgcct

SEQ ID NO: 3644 - DNA, 20 bp, Artificial Sequence
  Synthetic
gcctctcgggctgaccattc

SEQ ID NO: 3645 - DNA, 20 bp, Artificial Sequence
  Synthetic
gtcaggtctgtggagccgga

SEQ ID NO: 3646 - DNA, 20 bp, Artificial Sequence
  Synthetic
ggctgcacctcgatctggag

SEQ ID NO: 3647 - DNA, 20 bp, Artificial Sequence
  Synthetic
ggccaggtccttgacctctt

SEQ ID NO: 3648 - DNA, 20 bp, Artificial Sequence
  Synthetic
gcgttctctgtggtccaaac

SEQ ID NO: 3649 - DNA, 20 bp, Artificial Sequence
  Synthetic
gattcattaagttagtccct

SEQ ID NO: 3650 - DNA, 20 bp, Artificial Sequence
  Synthetic
gaaggagtttattacaccat

SEQ ID NO: 3651 - DNA, 20 bp, Artificial Sequence
  Synthetic
gacagggcgactgaaaggta

SEQ ID NO: 3652 - DNA, 20 bp, Artificial Sequence
  Synthetic
gtcccgggagctcttagggt

SEQ ID NO: 3653 - DNA, 20 bp, Artificial Sequence
  Synthetic
gctgcacctcgatctggagg

SEQ ID NO: 3654 - DNA, 20 bp, Artificial Sequence
  Synthetic
gattctaacaaccaagcgcc

SEQ ID NO: 3655 - DNA, 20 bp, Artificial Sequence
  Synthetic
gaactcagtaatagtaggat

SEQ ID NO: 3656 - DNA, 20 bp, Artificial Sequence
  Synthetic
gtagcatgcccttgtacgga

SEQ ID NO: 3657 - DNA, 20 bp, Artificial Sequence
  Synthetic
gtaggtccttcctgtgaagc

SEQ ID NO: 3658 - DNA, 20 bp, Artificial Sequence
  Synthetic
gctttctaatttgtttcctc

SEQ ID NO: 3659 - DNA, 20 bp, Artificial Sequence
  Synthetic
gtcaacctggctgtatagaa

SEQ ID NO: 3660 - DNA, 20 bp, Artificial Sequence
  Synthetic
gaatcttatataggtgaggg

SEQ ID NO: 3661 - DNA, 20 bp, Artificial Sequence
  Synthetic
gctctctgacatcctatgtg

SEQ ID NO: 3662 - DNA, 20 bp, Artificial Sequence
  Synthetic
gttcctcctgagctccctgc

SEQ ID NO: 3663 - DNA, 20 bp, Artificial Sequence
  Synthetic
gggaggaaaggaaccaacct

SEQ ID NO: 3664 - DNA, 20 bp, Artificial Sequence
  Synthetic
gggaactgcttctctgggct

SEQ ID NO: 3665 - DNA, 20 bp, Artificial Sequence
  Synthetic
ggtgggcctgagcctttgtt

SEQ ID NO: 3666 - DNA, 20 bp, Artificial Sequence
  Synthetic
gtccagtgctggcatgagag

SEQ ID NO: 3667 - DNA, 20 bp, Artificial Sequence
  Synthetic
gcccgagatctatctaattc

SEQ ID NO: 3668 - DNA, 20 bp, Artificial Sequence
  Synthetic
ggaaagccctggagaaagcc

SEQ ID NO: 3669 - DNA, 20 bp, Artificial Sequence
  Synthetic
gtaatttaccgtcttcccgg

SEQ ID NO: 3670 - DNA, 20 bp, Artificial Sequence
  Synthetic
gagaggagaaaggagagggt

SEQ ID NO: 3671 - DNA, 20 bp, Artificial Sequence
  Synthetic
gagattggctgggaggaagt

SEQ ID NO: 3672 - DNA, 20 bp, Artificial Sequence
  Synthetic
ggctttctctaggtaggaga

SEQ ID NO: 3673 - DNA, 20 bp, Artificial Sequence
  Synthetic
gacgagctctctgtcataca

SEQ ID NO: 3674 - DNA, 20 bp, Artificial Sequence
  Synthetic
gctcccagcaagggcaagaa

SEQ ID NO: 3675 - DNA, 20 bp, Artificial Sequence
  Synthetic
ggagtgacaggaggaattta

SEQ ID NO: 3676 - DNA, 20 bp, Artificial Sequence
  Synthetic
gtgtaaccaaggaggagggt

SEQ ID NO: 3677 - DNA, 20 bp, Artificial Sequence
  Synthetic
gaggtttatagggtgaacct

SEQ ID NO: 3678 - DNA, 20 bp, Artificial Sequence
  Synthetic
ggtgttgggtggagagctga

SEQ ID NO: 3679 - DNA, 20 bp, Artificial Sequence
  Synthetic
gctgtcttgaagacagtaaa

SEQ ID NO: 3680 - DNA, 20 bp, Artificial Sequence
  Synthetic
gctccaagcccagagtttac

SEQ ID NO: 3681 - DNA, 20 bp, Artificial Sequence
  Synthetic
gagcctcacccatcacaccc

SEQ ID NO: 3682 - DNA, 20 bp, Artificial Sequence
  Synthetic
gtcttactagtacaaatcca

SEQ ID NO: 3683 - DNA, 20 bp, Artificial Sequence
  Synthetic
gaaaccgaggctcagaacaa

SEQ ID NO: 3684 - DNA, 20 bp, Artificial Sequence
  Synthetic
gagaataaagtgttgtgccg

SEQ ID NO: 3685 - DNA, 20 bp, Artificial Sequence
  Synthetic
gtttggctgtctagtgacgg

SEQ ID NO: 3686 - DNA, 20 bp, Artificial Sequence
  Synthetic
gatatgactccaccagtgag

SEQ ID NO: 3687 - DNA, 20 bp, Artificial Sequence
  Synthetic
gtaagtgcgttgaagttgag

SEQ ID NO: 3688 - DNA, 20 bp, Artificial Sequence
  Synthetic
gaggaactcggtttccattt

SEQ ID NO: 3689 - DNA, 20 bp, Artificial Sequence
  Synthetic
gggctgcggacagaggaact

SEQ ID NO: 3690 - DNA, 20 bp, Artificial Sequence
  Synthetic
gaggtttgcttggcgaggga

SEQ ID NO: 3691 - DNA, 20 bp, Artificial Sequence
  Synthetic
gctggaagctcagttgggaa

SEQ ID NO: 3692 - DNA, 20 bp, Artificial Sequence
  Synthetic
gcaagccaatgggaaagcct

SEQ ID NO: 3693 - DNA, 20 bp, Artificial Sequence
  Synthetic
gcaaatcagggagggaggaa

SEQ ID NO: 3694 - DNA, 20 bp, Artificial Sequence
  Synthetic
gtgtctgcaggagactaacc

SEQ ID NO: 3695 - DNA, 20 bp, Artificial Sequence
  Synthetic
ggactgttccattggccggc

SEQ ID NO: 3696 - DNA, 20 bp, Artificial Sequence
  Synthetic
ggtaatcggagtagaaagat

SEQ ID NO: 3697 - DNA, 20 bp, Artificial Sequence
  Synthetic
gctaggccaaagccaagtcc

SEQ ID NO: 3698 - DNA, 20 bp, Artificial Sequence
  Synthetic
gaagagaagagtgggaggct

SEQ ID NO: 3699 - DNA, 20 bp, Artificial Sequence
  Synthetic
ggtctctggtaagataaagg

SEQ ID NO: 3700 - DNA, 20 bp, Artificial Sequence
  Synthetic
ggtgagtcagtgtggtctcc

SEQ ID NO: 3701 - DNA, 20 bp, Artificial Sequence
  Synthetic
ggaaagggccaagacacaac

SEQ ID NO: 3702 - DNA, 20 bp, Artificial Sequence
  Synthetic
ggtgactaagggagggcttt

SEQ ID NO: 3703 - DNA, 20 bp, Artificial Sequence
  Synthetic
gtaaacagcggccacgagcc

SEQ ID NO: 3704 - DNA, 20 bp, Artificial Sequence
  Synthetic
ggagcctgcaaatgagaatc

SEQ ID NO: 3705 - DNA, 20 bp, Artificial Sequence
  Synthetic
ggcaacaactggtcaaggct

SEQ ID NO: 3706 - DNA, 20 bp, Artificial Sequence
  Synthetic
gcgaaggtcctgaggtgcaa

SEQ ID NO: 3707 - DNA, 20 bp, Artificial Sequence
  Synthetic
gctcctgctgatggaagttc

SEQ ID NO: 3708 - DNA, 20 bp, Artificial Sequence
  Synthetic
ggtgcaaaggagctccaatg

SEQ ID NO: 3709 - DNA, 20 bp, Artificial Sequence
  Synthetic
gagtgtgagggcagagcttg

SEQ ID NO: 3710 - DNA, 20 bp, Artificial Sequence
  Synthetic
gctgggaacggaggtggaag

SEQ ID NO: 3711 - DNA, 20 bp, Artificial Sequence
  Synthetic
ggatctctcaccttccagct

SEQ ID NO: 3712 - DNA, 20 bp, Artificial Sequence
  Synthetic
gcatactgtactaattaaga

SEQ ID NO: 3713 - DNA, 20 bp, Artificial Sequence
  Synthetic
gcaaccaagtttccaaataa

SEQ ID NO: 3714 - DNA, 20 bp, Artificial Sequence
  Synthetic
gctgttggtagttctgatgg

SEQ ID NO: 3715 - DNA, 20 bp, Artificial Sequence
  Synthetic
gtgtctgaagtgacctgtga

SEQ ID NO: 3716 - DNA, 20 bp, Artificial Sequence
  Synthetic
gaccatcagctgattctgaa

SEQ ID NO: 3717 - DNA, 20 bp, Artificial Sequence
  Synthetic
ggccagaatctgacggtgac

SEQ ID NO: 3718 - DNA, 20 bp, Artificial Sequence
  Synthetic
gcccttctggatgggaagag

SEQ ID NO: 3719 - DNA, 20 bp, Artificial Sequence
  Synthetic
gtgacaattactatcctctt

SEQ ID NO: 3720 - DNA, 20 bp, Artificial Sequence
  Synthetic
gcctgatcagctgccagaga

SEQ ID NO: 3721 - DNA, 20 bp, Artificial Sequence
  Synthetic
gcctgccctattgtggctgc

SEQ ID NO: 3722 - DNA, 20 bp, Artificial Sequence
  Synthetic
gggtggtatgcttatgctct

SEQ ID NO: 3723 - DNA, 20 bp, Artificial Sequence
  Synthetic
ggaagaccaagaatgagcaa

SEQ ID NO: 3724 - DNA, 20 bp, Artificial Sequence
  Synthetic
gtttgcagagtgaatgctga

SEQ ID NO: 3725 - DNA, 20 bp, Artificial Sequence
  Synthetic
gcattcactctgcaaacatt

SEQ ID NO: 3726 - DNA, 20 bp, Artificial Sequence
  Synthetic
gtggaagtaaacaggagtga

SEQ ID NO: 3727 - DNA, 20 bp, Artificial Sequence
  Synthetic
gagtcatctccctccctctc

SEQ ID NO: 3728 - DNA, 20 bp, Artificial Sequence
  Synthetic
gaaccgaatatgaccagaga

SEQ ID NO: 3729 - DNA, 20 bp, Artificial Sequence
  Synthetic
gtatctcatggaagaattcc

SEQ ID NO: 3730 - DNA, 20 bp, Artificial Sequence
  Synthetic
gaggaggattggccgctgac

SEQ ID NO: 3731 - DNA, 20 bp, Artificial Sequence
  Synthetic
gttgtatattagaatgccca

SEQ ID NO: 3732 - DNA, 20 bp, Artificial Sequence
  Synthetic
ggcgctccagcactgaacta

SEQ ID NO: 3733 - DNA, 20 bp, Artificial Sequence
  Synthetic
gggagcagcgtgacccttta

SEQ ID NO: 3734 - DNA, 20 bp, Artificial Sequence
  Synthetic
gccttgaaggtcgggcagac

SEQ ID NO: 3735 - DNA, 20 bp, Artificial Sequence
  Synthetic
ggtgctagagactcacctca

SEQ ID NO: 3736 - DNA, 20 bp, Artificial Sequence
  Synthetic
gtgaacctctcgagccttta

SEQ ID NO: 3737 - DNA, 20 bp, Artificial Sequence
  Synthetic
gtttctgtaccagcctccag

SEQ ID NO: 3738 - DNA, 20 bp, Artificial Sequence
  Synthetic
gtgttcactagttagctagt

SEQ ID NO: 3739 - DNA, 20 bp, Artificial Sequence
  Synthetic
gcctaacggctcattgtgtg

SEQ ID NO: 3740 - DNA, 20 bp, Artificial Sequence
  Synthetic
gaccctcactggctactgca

SEQ ID NO: 3741 - DNA, 20 bp, Artificial Sequence
  Synthetic
gtgccctatgagtcagggta

SEQ ID NO: 3742 - DNA, 20 bp, Artificial Sequence
  Synthetic
gggtgctggtggttgtctag

SEQ ID NO: 3743 - DNA, 20 bp, Artificial Sequence
  Synthetic
ggctactgcatggagctgaa

SEQ ID NO: 3744 - DNA, 20 bp, Artificial Sequence
  Synthetic
ggtgccctatgagtcagggt

SEQ ID NO: 3745 - DNA, 20 bp, Artificial Sequence
  Synthetic
gataatgcctgaaagggagc

SEQ ID NO: 3746 - DNA, 20 bp, Artificial Sequence
  Synthetic
gggtgtgtgcgatatgtgtg

SEQ ID NO: 3747 - DNA, 20 bp, Artificial Sequence
  Synthetic
gtctgggtggctaaatagac

SEQ ID NO: 3748 - DNA, 20 bp, Artificial Sequence
  Synthetic
gagtgatcacagcaggaaag

SEQ ID NO: 3749 - DNA, 20 bp, Artificial Sequence
  Synthetic
gggtaggagaaactgggtag

SEQ ID NO: 3750 - DNA, 20 bp, Artificial Sequence
  Synthetic
gaaggacagtgcttattgaa

SEQ ID NO: 3751 - DNA, 20 bp, Artificial Sequence
  Synthetic
gtaccaaagagctagtggcg

SEQ ID NO: 3752 - DNA, 20 bp, Artificial Sequence
  Synthetic
gcggtttcttggtagggcgt

SEQ ID NO: 3753 - DNA, 20 bp, Artificial Sequence
  Synthetic
ggagaaccagggcgagatgg

SEQ ID NO: 3754 - DNA, 20 bp, Artificial Sequence
  Synthetic
ggaggactgaaggctagggt

SEQ ID NO: 3755 - DNA, 20 bp, Artificial Sequence
  Synthetic
gggcggaggactgaaggcta

SEQ ID NO: 3756 - DNA, 20 bp, Artificial Sequence
  Synthetic
gatttgaccatctcttgccg

SEQ ID NO: 3757 - DNA, 20 bp, Artificial Sequence
  Synthetic
gagtcacattgatcctgcaa

SEQ ID NO: 3758 - DNA, 20 bp, Artificial Sequence
  Synthetic
ggctgtatagctcttcacca

SEQ ID NO: 3759 - DNA, 20 bp, Artificial Sequence
  Synthetic
gaaagttgcaggtcatgtta

SEQ ID NO: 3760 - DNA, 20 bp, Artificial Sequence
  Synthetic
gcaatcagctctaacttctt

SEQ ID NO: 3761 - DNA, 20 bp, Artificial Sequence
  Synthetic
ggagtagggaaatgcaagcc

SEQ ID NO: 3762 - DNA, 20 bp, Artificial Sequence
  Synthetic
gctgtatagctcttcaccaa

SEQ ID NO: 3763 - DNA, 20 bp, Artificial Sequence
  Synthetic
gggaagccacctgacgatgg

SEQ ID NO: 3764 - DNA, 20 bp, Artificial Sequence
  Synthetic
gagagggttctactggccgc

SEQ ID NO: 3765 - DNA, 20 bp, Artificial Sequence
  Synthetic
ggatatttctatctgggttt

SEQ ID NO: 3766 - DNA, 20 bp, Artificial Sequence
  Synthetic
ggtgaggaggtggctggaga

SEQ ID NO: 3767 - DNA, 20 bp, Artificial Sequence
  Synthetic
gtgtgttaagattggttcaa

SEQ ID NO: 3768 - DNA, 20 bp, Artificial Sequence
  Synthetic
gtttgaagcctccaggaccg

SEQ ID NO: 3769 - DNA, 20 bp, Artificial Sequence
  Synthetic
gccacagacagtcatctcat

SEQ ID NO: 3770 - DNA, 20 bp, Artificial Sequence
  Synthetic
gatagagacagtctctcctc

SEQ ID NO: 3771 - DNA, 20 bp, Artificial Sequence
  Synthetic
ggtggcgtatcggtccctat

SEQ ID NO: 3772 - DNA, 20 bp, Artificial Sequence
  Synthetic
gtctagactttagagcaagg

SEQ ID NO: 3773 - DNA, 20 bp, Artificial Sequence
  Synthetic
gccaccagagaactccgctg

SEQ ID NO: 3774 - DNA, 20 bp, Artificial Sequence
  Synthetic
ggtgctctgctggtacacga

SEQ ID NO: 3775 - DNA, 20 bp, Artificial Sequence
  Synthetic
ggtggcagaggtccttgctc

SEQ ID NO: 3776 - DNA, 20 bp, Artificial Sequence
  Synthetic
gtgctctgctggtacacgag

SEQ ID NO: 3777 - DNA, 20 bp, Artificial Sequence
  Synthetic
gaagctgaaccaggcttcat

SEQ ID NO: 3778 - DNA, 20 bp, Artificial Sequence
  Synthetic
gggctgctacatgcaatggc

SEQ ID NO: 3779 - DNA, 20 bp, Artificial Sequence
  Synthetic
ggaacccaaagttctcaacg

SEQ ID NO: 3780 - DNA, 20 bp, Artificial Sequence
  Synthetic
ggagcgattggaaacttcca

SEQ ID NO: 3781 - DNA, 20 bp, Artificial Sequence
  Synthetic
gacctctgcacaaatctagc

SEQ ID NO: 3782 - DNA, 20 bp, Artificial Sequence
  Synthetic
gggaccatcatttcacaact

SEQ ID NO: 3783 - DNA, 20 bp, Artificial Sequence
  Synthetic
gccttgggaggtgacgatcc

SEQ ID NO: 3784 - DNA, 20 bp, Artificial Sequence
  Synthetic
gaggaagtatgtggtgagcc

SEQ ID NO: 3785 - DNA, 20 bp, Artificial Sequence
  Synthetic
gctggctcagtgcttaagag

SEQ ID NO: 3786 - DNA, 20 bp, Artificial Sequence
  Synthetic
gagggtaatagagagaggga

SEQ ID NO: 3787 - DNA, 20 bp, Artificial Sequence
  Synthetic
gcactagaaggatttatgtg

SEQ ID NO: 3788 - DNA, 20 bp, Artificial Sequence
  Synthetic
gtatgtttgtgggaggtgaa

SEQ ID NO: 3789 - DNA, 20 bp, Artificial Sequence
  Synthetic
gcaagagggtaatagagaga

SEQ ID NO: 3790 - DNA, 20 bp, Artificial Sequence
  Synthetic
gcggtatataagcctggcgg

SEQ ID NO: 3791 - DNA, 20 bp, Artificial Sequence
  Synthetic
ggcgacggcgtcaacaaacc

SEQ ID NO: 3792 - DNA, 20 bp, Artificial Sequence
  Synthetic
gacggaaacgcgtcccggat

SEQ ID NO: 3793 - DNA, 20 bp, Artificial Sequence
  Synthetic
gtttcttgggtgactcagtt

SEQ ID NO: 3794 - DNA, 20 bp, Artificial Sequence
  Synthetic
gacgtagggacagggcatcc

SEQ ID NO: 3795 - DNA, 20 bp, Artificial Sequence
  Synthetic
gtggcctcacgcagcctttc

SEQ ID NO: 3796 - DNA, 20 bp, Artificial Sequence
  Synthetic
gacctttctatctgtaccga

SEQ ID NO: 3797 - DNA, 20 bp, Artificial Sequence
  Synthetic
gcctgggctgtttaggaagc

SEQ ID NO: 3798 - DNA, 20 bp, Artificial Sequence
  Synthetic
gatgccctgtccctacgtcg

SEQ ID NO: 3799 - DNA, 20 bp, Artificial Sequence
  Synthetic
gaatgaatggtaagagggta

SEQ ID NO: 3800 - DNA, 20 bp, Artificial Sequence
  Synthetic
gaggatttagataagccgga

SEQ ID NO: 3801 - DNA, 20 bp, Artificial Sequence
  Synthetic
gaacaggacattcgtcatga

SEQ ID NO: 3802 - DNA, 20 bp, Artificial Sequence
  Synthetic
gcttggtgctaggctagagt

SEQ ID NO: 3803 - DNA, 20 bp, Artificial Sequence
  Synthetic
ggatgactgcccagctgtgg

SEQ ID NO: 3804 - DNA, 20 bp, Artificial Sequence
  Synthetic
ggcgttccagatttacattg

SEQ ID NO: 3805 - DNA, 20 bp, Artificial Sequence
  Synthetic
gaaagggatgagttgtgagc

SEQ ID NO: 3806 - DNA, 20 bp, Artificial Sequence
  Synthetic
gggaccctagtgctccaaag

SEQ ID NO: 3807 - DNA, 20 bp, Artificial Sequence
  Synthetic
ggcagtagccagagctaggg

SEQ ID NO: 3808 - DNA, 20 bp, Artificial Sequence
  Synthetic
gtgcgtatgcgagagagggc

SEQ ID NO: 3809 - DNA, 20 bp, Artificial Sequence
  Synthetic
gcagttggcagatgatgtaa

SEQ ID NO: 3810 - DNA, 20 bp, Artificial Sequence
  Synthetic
gataatggaaggaacaagga

SEQ ID NO: 3811 - DNA, 20 bp, Artificial Sequence
  Synthetic
gaatctcagaagctaggaga

SEQ ID NO: 3812 - DNA, 20 bp, Artificial Sequence
  Synthetic
gacaagcgcgtacgcgagca

SEQ ID NO: 3813 - DNA, 20 bp, Artificial Sequence
  Synthetic
gtgctcaaataactctgaga

SEQ ID NO: 3814 - DNA, 20 bp, Artificial Sequence
  Synthetic
gtcaacagcggtgtttgtct

SEQ ID NO: 3815 - DNA, 20 bp, Artificial Sequence
  Synthetic
gtaatttctggcatagagat

SEQ ID NO: 3816 - DNA, 20 bp, Artificial Sequence
  Synthetic
gggctgcaatcctctttctg

SEQ ID NO: 3817 - DNA, 20 bp, Artificial Sequence
  Synthetic
gtgaatgtttgtgccttctt

SEQ ID NO: 3818 - DNA, 20 bp, Artificial Sequence
  Synthetic
gcgggtggaatctaggaaga

SEQ ID NO: 3819 - DNA, 20 bp, Artificial Sequence
  Synthetic
gtgcagccagccagtgtgaa

SEQ ID NO: 3820 - DNA, 20 bp, Artificial Sequence
  Synthetic
gagaggagcgggtggaatct

SEQ ID NO: 3821 - DNA, 20 bp, Artificial Sequence
  Synthetic
ggctaggagggtaagcatag

SEQ ID NO: 3822 - DNA, 20 bp, Artificial Sequence
  Synthetic
ggaaggtgagtggtttggtt

SEQ ID NO: 3823 - DNA, 20 bp, Artificial Sequence
  Synthetic
gtcctctccgagtgccgcat

SEQ ID NO: 3824 - DNA, 20 bp, Artificial Sequence
  Synthetic
gcaaatggcagtaaaggcct

SEQ ID NO: 3825 - DNA, 20 bp, Artificial Sequence
  Synthetic
gtttggtggaacccacactc

SEQ ID NO: 3826 - DNA, 20 bp, Artificial Sequence
  Synthetic
gtgaccatgtaaggtaaaca

SEQ ID NO: 3827 - DNA, 20 bp, Artificial Sequence
  Synthetic
gtacccagtgcagatccgag

SEQ ID NO: 3828 - DNA, 20 bp, Artificial Sequence
  Synthetic
gtaacttcatggagcaggta

SEQ ID NO: 3829 - DNA, 20 bp, Artificial Sequence
  Synthetic
gaccatgtaaggtaaacagg

SEQ ID NO: 3830 - DNA, 20 bp, Artificial Sequence
  Synthetic
ggcactcggagaggaccatg

SEQ ID NO: 3831 - DNA, 20 bp, Artificial Sequence
  Synthetic
gaccatgaatttgagaggga

SEQ ID NO: 3832 - DNA, 20 bp, Artificial Sequence
  Synthetic
gatctccctgctgccttaca

SEQ ID NO: 3833 - DNA, 20 bp, Artificial Sequence
  Synthetic
gagaggtgcgtctagaacta

SEQ ID NO: 3834 - DNA, 20 bp, Artificial Sequence
  Synthetic
gaagggcccttctgactggc

SEQ ID NO: 3835 - DNA, 20 bp, Artificial Sequence
  Synthetic
ggatgggcgtaactgcctag

SEQ ID NO: 3836 - DNA, 20 bp, Artificial Sequence
  Synthetic
gggcctggattgtgacgtga

SEQ ID NO: 3837 - DNA, 20 bp, Artificial Sequence
  Synthetic
gggatgggcgtaactgccta

SEQ ID NO: 3838 - DNA, 20 bp, Artificial Sequence
  Synthetic
ggctcctctaaagcagagtc

SEQ ID NO: 3839 - DNA, 20 bp, Artificial Sequence
  Synthetic
ggactcctccctgttcctgc

SEQ ID NO: 3840 - DNA, 20 bp, Artificial Sequence
  Synthetic
ggctaccaaagattaagggc

SEQ ID NO: 3841 - DNA, 20 bp, Artificial Sequence
  Synthetic
ggcagaaatgctgatagtag

SEQ ID NO: 3842 - DNA, 20 bp, Artificial Sequence
  Synthetic
gatcctccctataggcagag

SEQ ID NO: 3843 - DNA, 20 bp, Artificial Sequence
  Synthetic
gtgttataacagggaagggc

SEQ ID NO: 3844 - DNA, 20 bp, Artificial Sequence
  Synthetic
gcaagattgcagaaggaggt

SEQ ID NO: 3845 - DNA, 20 bp, Artificial Sequence
  Synthetic
gggagtgggacagaaagaat

SEQ ID NO: 3846 - DNA, 20 bp, Artificial Sequence
  Synthetic
ggaaggaacaagagggagaa

SEQ ID NO: 3847 - DNA, 20 bp, Artificial Sequence
  Synthetic
gagattgggaggtgggaggc

SEQ ID NO: 3848 - DNA, 20 bp, Artificial Sequence
  Synthetic
gtaccctgtgccctccttca

SEQ ID NO: 3849 - DNA, 20 bp, Artificial Sequence
  Synthetic
gaacaggcttcttcggtgca

SEQ ID NO: 3850 - DNA, 20 bp, Artificial Sequence
  Synthetic
gtaagaactggagcccaggc

SEQ ID NO: 3851 - DNA, 20 bp, Artificial Sequence
  Synthetic
ggcctcagaatcagagggaa

SEQ ID NO: 3852 - DNA, 20 bp, Artificial Sequence
  Synthetic
gcatattaagtgaaaccaca

SEQ ID NO: 3853 - DNA, 20 bp, Artificial Sequence
  Synthetic
gagtccagtcctcactagcc

SEQ ID NO: 3854 - DNA, 20 bp, Artificial Sequence
  Synthetic
ggctggtactacttgctcag

SEQ ID NO: 3855 - DNA, 20 bp, Artificial Sequence
  Synthetic
ggctcaggtaaggaagggat

SEQ ID NO: 3856 - DNA, 20 bp, Artificial Sequence
  Synthetic
ggctcctggctagtgaggac

SEQ ID NO: 3857 - DNA, 20 bp, Artificial Sequence
  Synthetic
gctgctgtcactgagctgac

SEQ ID NO: 3858 - DNA, 20 bp, Artificial Sequence
  Synthetic
ggtcactcacatctcctatt

SEQ ID NO: 3859 - DNA, 20 bp, Artificial Sequence
  Synthetic
gagctgaaataaggcaactc

SEQ ID NO: 3860 - DNA, 20 bp, Artificial Sequence
  Synthetic
ggagaggttgcagtgtctgt

SEQ ID NO: 3861 - DNA, 20 bp, Artificial Sequence
  Synthetic
gactctgacctatcattcaa

SEQ ID NO: 3862 - DNA, 20 bp, Artificial Sequence
  Synthetic
gggcaagtggtcccaggact

SEQ ID NO: 3863 - DNA, 20 bp, Artificial Sequence
  Synthetic
gtcaagtccttctatgccct

SEQ ID NO: 3864 - DNA, 20 bp, Artificial Sequence
  Synthetic
gggacacactcacatggcaa

SEQ ID NO: 3865 - DNA, 20 bp, Artificial Sequence
  Synthetic
gattccgatcacctacctgg

SEQ ID NO: 3866 - DNA, 20 bp, Artificial Sequence
  Synthetic
gtggtgctgtcagggtaagg

SEQ ID NO: 3867 - DNA, 20 bp, Artificial Sequence
  Synthetic
ggaaacacacacgcacaggc

SEQ ID NO: 3868 - DNA, 20 bp, Artificial Sequence
  Synthetic
ggctgtcatacagctcaaga

SEQ ID NO: 3869 - DNA, 20 bp, Artificial Sequence
  Synthetic
ggaagagttcttcccttcca

SEQ ID NO: 3870 - DNA, 20 bp, Artificial Sequence
  Synthetic
gggaagggtgttccctagaa

SEQ ID NO: 3871 - DNA, 20 bp, Artificial Sequence
  Synthetic
gtacctgctgtacttcggat

SEQ ID NO: 3872 - DNA, 20 bp, Artificial Sequence
  Synthetic
gaagaggtaaatacaaactc

SEQ ID NO: 3873 - DNA, 20 bp, Artificial Sequence
  Synthetic
ggagcacagctctccctttg

SEQ ID NO: 3874 - DNA, 20 bp, Artificial Sequence
  Synthetic
gatggttccacattcaggtc

SEQ ID NO: 3875 - DNA, 20 bp, Artificial Sequence
  Synthetic
gtgccagtgttgttgtgttt

SEQ ID NO: 3876 - DNA, 20 bp, Artificial Sequence
  Synthetic
gggtggatgtttcttgcagg

SEQ ID NO: 3877 - DNA, 20 bp, Artificial Sequence
  Synthetic
gctaagtcagcggctttaag

SEQ ID NO: 3878 - DNA, 20 bp, Artificial Sequence
  Synthetic
gtgcacagctgacccaaagg

SEQ ID NO: 3879 - DNA, 20 bp, Artificial Sequence
  Synthetic
gcccggaggaatcttccaga

SEQ ID NO: 3880 - DNA, 20 bp, Artificial Sequence
  Synthetic
gggtgctaggaaatgaacta

SEQ ID NO: 3881 - DNA, 20 bp, Artificial Sequence
  Synthetic
gtcgccagtgctatgcctct

SEQ ID NO: 3882 - DNA, 20 bp, Artificial Sequence
  Synthetic
gaactctagcgaaccactgg

SEQ ID NO: 3883 - DNA, 20 bp, Artificial Sequence
  Synthetic
gtagagtaaatagagacacg

SEQ ID NO: 3884 - DNA, 20 bp, Artificial Sequence
  Synthetic
gagcatttaatctgctggag

SEQ ID NO: 3885 - DNA, 20 bp, Artificial Sequence
  Synthetic
ggagggagtctgttaggagg

SEQ ID NO: 3886 - DNA, 20 bp, Artificial Sequence
  Synthetic
gactagaagtgaggcgccgg

SEQ ID NO: 3887 - DNA, 20 bp, Artificial Sequence
  Synthetic
gggcagaaagttgccattta

SEQ ID NO: 3888 - DNA, 20 bp, Artificial Sequence
  Synthetic
gattgggcgagtgggatcct

SEQ ID NO: 3889 - DNA, 20 bp, Artificial Sequence
  Synthetic
gaaggaaagaagctctaacg

SEQ ID NO: 3890 - DNA, 20 bp, Artificial Sequence
  Synthetic
gacttgttctaggaagtgtt

SEQ ID NO: 3891 - DNA, 20 bp, Artificial Sequence
  Synthetic
ggtattaatcgacttgttct

SEQ ID NO: 3892 - DNA, 20 bp, Artificial Sequence
  Synthetic
gggtgggagaaagagtgggt

SEQ ID NO: 3893 - DNA, 20 bp, Artificial Sequence
  Synthetic
ggtgaagtaacccagcagcg

SEQ ID NO: 3894 - DNA, 20 bp, Artificial Sequence
  Synthetic
gcgagatctggaagcttggg

SEQ ID NO: 3895 - DNA, 20 bp, Artificial Sequence
  Synthetic
gactttgaaggatggagggt

SEQ ID NO: 3896 - DNA, 20 bp, Artificial Sequence
  Synthetic
gggtggactttggatggaca

SEQ ID NO: 3897 - DNA, 20 bp, Artificial Sequence
  Synthetic
gctcgagtctaaggagaggt

SEQ ID NO: 3898 - DNA, 20 bp, Artificial Sequence
  Synthetic
gaccttcccacctaaagggc

SEQ ID NO: 3899 - DNA, 20 bp, Artificial Sequence
  Synthetic
ggactgcaccgtagcagcag

SEQ ID NO: 3900 - DNA, 20 bp, Artificial Sequence
  Synthetic
gacgcaatagtgtctattgg

SEQ ID NO: 3901 - DNA, 20 bp, Artificial Sequence
  Synthetic
gtgaagcagggtatggaagc

SEQ ID NO: 3902 - DNA, 20 bp, Artificial Sequence
  Synthetic
ggtgtctggtggaacaggaa

SEQ ID NO: 3903 - DNA, 20 bp, Artificial Sequence
  Synthetic
gactgcccttggtttcttag

SEQ ID NO: 3904 - DNA, 20 bp, Artificial Sequence
  Synthetic
gtaaccgtgcccaagaggca

SEQ ID NO: 3905 - DNA, 20 bp, Artificial Sequence
  Synthetic
gcaggatgtgccagtggctc

SEQ ID NO: 3906 - DNA, 20 bp, Artificial Sequence
  Synthetic
gagtgggagagctagtggga

SEQ ID NO: 3907 - DNA, 20 bp, Artificial Sequence
  Synthetic
gacgtcgctttgccctgtcc

SEQ ID NO: 3908 - DNA, 20 bp, Artificial Sequence
  Synthetic
gtgacttgtccgaagtccca

SEQ ID NO: 3909 - DNA, 20 bp, Artificial Sequence
  Synthetic
gtgcctgacacctacttacc

SEQ ID NO: 3910 - DNA, 20 bp, Artificial Sequence
  Synthetic
gtctaacatggaggctggga

SEQ ID NO: 3911 - DNA, 20 bp, Artificial Sequence
  Synthetic
gtgggttcagagacaatctg

SEQ ID NO: 3912 - DNA, 20 bp, Artificial Sequence
  Synthetic
gaaaggtgcacagtctccag

SEQ ID NO: 3913 - DNA, 20 bp, Artificial Sequence
  Synthetic
gtgaggacaaggtaacagca

SEQ ID NO: 3914 - DNA, 20 bp, Artificial Sequence
  Synthetic
gtagtaggagccctcagtga

SEQ ID NO: 3915 - DNA, 20 bp, Artificial Sequence
  Synthetic
gatgtggaaatccaggtgca

SEQ ID NO: 3916 - DNA, 20 bp, Artificial Sequence
  Synthetic
ggtcacagtcctagggatgg

SEQ ID NO: 3917 - DNA, 20 bp, Artificial Sequence
  Synthetic
ggtccagagtgtcagagttg

SEQ ID NO: 3918 - DNA, 20 bp, Artificial Sequence
  Synthetic
gcttctaggcacctcggttc

SEQ ID NO: 3919 - DNA, 20 bp, Artificial Sequence
  Synthetic
gcacctcggttccggctgaa

SEQ ID NO: 3920 - DNA, 20 bp, Artificial Sequence
  Synthetic
gctacactggtttgtttggt

SEQ ID NO: 3921 - DNA, 20 bp, Artificial Sequence
  Synthetic
gatgggtctttacaaccaaa

SEQ ID NO: 3922 - DNA, 20 bp, Artificial Sequence
  Synthetic
gaaacctaccgggtcagccc

SEQ ID NO: 3923 - DNA, 20 bp, Artificial Sequence
  Synthetic
gaactcggagcgccaaccca

SEQ ID NO: 3924 - DNA, 20 bp, Artificial Sequence
  Synthetic
ggtggctgtgtgtgctactt

SEQ ID NO: 3925 - DNA, 20 bp, Artificial Sequence
  Synthetic
gcaacagtgtctcctcaacc

SEQ ID NO: 3926 - DNA, 20 bp, Artificial Sequence
  Synthetic
gcccgggagagcgagatcaa

SEQ ID NO: 3927 - DNA, 20 bp, Artificial Sequence
  Synthetic
gtataaatactgcggcgggc

SEQ ID NO: 3928 - DNA, 20 bp, Artificial Sequence
  Synthetic
gcccgccgcagtatttatac

SEQ ID NO: 3929 - DNA, 20 bp, Artificial Sequence
  Synthetic
gtcctctaggatcaaggagg

SEQ ID NO: 3930 - DNA, 20 bp, Artificial Sequence
  Synthetic
gcaggtgtgtgggtaccagc

SEQ ID NO: 3931 - DNA, 20 bp, Artificial Sequence
  Synthetic
gggattctcctcatggatta

SEQ ID NO: 3932 - DNA, 20 bp, Artificial Sequence
  Synthetic
ggccatctgtcagtgctgtt

SEQ ID NO: 3933 - DNA, 20 bp, Artificial Sequence
  Synthetic
gattctcctcatggattagg

SEQ ID NO: 3934 - DNA, 20 bp, Artificial Sequence
  Synthetic
gtcttggcacaattcctcta

SEQ ID NO: 3935 - DNA, 20 bp, Artificial Sequence
  Synthetic
gactctgaagggctgtgtgt

SEQ ID NO: 3936 - DNA, 20 bp, Artificial Sequence
  Synthetic
gtttgtgtgtgtgtgtgtgg

SEQ ID NO: 3937 - DNA, 20 bp, Artificial Sequence
  Synthetic
gcgaagctgcctttggctct

SEQ ID NO: 3938 - DNA, 20 bp, Artificial Sequence
  Synthetic
ggtaaatacttacttagctt

SEQ ID NO: 3939 - DNA, 20 bp, Artificial Sequence
  Synthetic
gtgacatccctgagtcaacc

SEQ ID NO: 3940 - DNA, 20 bp, Artificial Sequence
  Synthetic
gtgtttgaggaagaaggctg

SEQ ID NO: 3941 - DNA, 20 bp, Artificial Sequence
  Synthetic
gctgtttacatctgtaaatg

SEQ ID NO: 3942 - DNA, 20 bp, Artificial Sequence
  Synthetic
ggtaaatcttgaagtggaag

SEQ ID NO: 3943 - DNA, 20 bp, Artificial Sequence
  Synthetic
gatgagatttacatagtctg

SEQ ID NO: 3944 - DNA, 20 bp, Artificial Sequence
  Synthetic
ggagcctgtgctagtgagag

SEQ ID NO: 3945 - DNA, 20 bp, Artificial Sequence
  Synthetic
gctagtgagagtgggagggt

SEQ ID NO: 3946 - DNA, 20 bp, Artificial Sequence
  Synthetic
gatactacttcagattcttc

SEQ ID NO: 3947 - DNA, 20 bp, Artificial Sequence
  Synthetic
ggtcagcccatctacaaggc

SEQ ID NO: 3948 - DNA, 20 bp, Artificial Sequence
  Synthetic
gaactcagtcacgtaagtgg

SEQ ID NO: 3949 - DNA, 20 bp, Artificial Sequence
  Synthetic
gaaatttcagtccaatagga

SEQ ID NO: 3950 - DNA, 20 bp, Artificial Sequence
  Synthetic
gcttccgggcttagagaagg

SEQ ID NO: 3951 - DNA, 20 bp, Artificial Sequence
  Synthetic
gctctttcagcggctcacgg

SEQ ID NO: 3952 - DNA, 20 bp, Artificial Sequence
  Synthetic
gataatgaagggacaaacga

SEQ ID NO: 3953 - DNA, 20 bp, Artificial Sequence
  Synthetic
gggtttgggctggagatggg

SEQ ID NO: 3954 - DNA, 20 bp, Artificial Sequence
  Synthetic
ggaacctcgcagagaggagg

SEQ ID NO: 3955 - DNA, 20 bp, Artificial Sequence
  Synthetic
gcctttgataggaatcgcca

SEQ ID NO: 3956 - DNA, 20 bp, Artificial Sequence
  Synthetic
gaatgctggctccagcaggt

SEQ ID NO: 3957 - DNA, 20 bp, Artificial Sequence
  Synthetic
gggaaaggaagtgccggagc

SEQ ID NO: 3958 - DNA, 20 bp, Artificial Sequence
  Synthetic
gacacaggcaattatgctgc

SEQ ID NO: 3959 - DNA, 20 bp, Artificial Sequence
  Synthetic
gcaaggcaaaggcaggctag

SEQ ID NO: 3960 - DNA, 20 bp, Artificial Sequence
  Synthetic
gtggcctcagaacgggtgtc

SEQ ID NO: 3961 - DNA, 20 bp, Artificial Sequence
  Synthetic
ggcatggaccaaggactgga

SEQ ID NO: 3962 - DNA, 20 bp, Artificial Sequence
  Synthetic
gggtttctaatgcccagcta

SEQ ID NO: 3963 - DNA, 20 bp, Artificial Sequence
  Synthetic
gaggctacagtgtctcagct

SEQ ID NO: 3964 - DNA, 20 bp, Artificial Sequence
  Synthetic
ggattattgagaggctggca

SEQ ID NO: 3965 - DNA, 20 bp, Artificial Sequence
  Synthetic
gaaaggtgggaatgaagcag

SEQ ID NO: 3966 - DNA, 20 bp, Artificial Sequence
  Synthetic
gtctatgcggctctgagtgt

SEQ ID NO: 3967 - DNA, 20 bp, Artificial Sequence
  Synthetic
gcaggaagtctttggaaagg

SEQ ID NO: 3968 - DNA, 20 bp, Artificial Sequence
  Synthetic
gaaactaggtactggagcag

SEQ ID NO: 3969 - DNA, 20 bp, Artificial Sequence
  Synthetic
gtgctgcccagcaagtctcc

SEQ ID NO: 3970 - DNA, 20 bp, Artificial Sequence
  Synthetic
ggcagggaagtcaggctttg

SEQ ID NO: 3971 - DNA, 20 bp, Artificial Sequence
  Synthetic
gtgcaaacctcatacattga

SEQ ID NO: 3972 - DNA, 20 bp, Artificial Sequence
  Synthetic
gagtctaggaggagaggcac

SEQ ID NO: 3973 - DNA, 20 bp, Artificial Sequence
  Synthetic
gtgcctcaggcttgggaagc

SEQ ID NO: 3974 - DNA, 20 bp, Artificial Sequence
  Synthetic
gctctagaatatctgggatg

SEQ ID NO: 3975 - DNA, 20 bp, Artificial Sequence
  Synthetic
ggcatcttaggattccaccc

SEQ ID NO: 3976 - DNA, 20 bp, Artificial Sequence
  Synthetic
gctgcaccagttgggctgag

SEQ ID NO: 3977 - DNA, 20 bp, Artificial Sequence
  Synthetic
gtggtctctcttaaacttat

SEQ ID NO: 3978 - DNA, 20 bp, Artificial Sequence
  Synthetic
gagctctagaatatctggga

SEQ ID NO: 3979 - DNA, 20 bp, Artificial Sequence
  Synthetic
gtagatttcacatactaaga

SEQ ID NO: 3980 - DNA, 20 bp, Artificial Sequence
  Synthetic
gggagatactttcatgactt

SEQ ID NO: 3981 - DNA, 20 bp, Artificial Sequence
  Synthetic
gttcagctgagttcacatga

SEQ ID NO: 3982 - DNA, 20 bp, Artificial Sequence
  Synthetic
ggtaccttcttcaagcaccc

SEQ ID NO: 3983 - DNA, 20 bp, Artificial Sequence
  Synthetic
gggctgttcttactaaacaa

SEQ ID NO: 3984 - DNA, 20 bp, Artificial Sequence
  Synthetic
gagtggttactttcagcctg

SEQ ID NO: 3985 - DNA, 20 bp, Artificial Sequence
  Synthetic
ggaggactttgctcagtacg

SEQ ID NO: 3986 - DNA, 20 bp, Artificial Sequence
  Synthetic
gtctttcacaactctttgga

SEQ ID NO: 3987 - DNA, 20 bp, Artificial Sequence
  Synthetic
gctattgctagggagaaatc

SEQ ID NO: 3988 - DNA, 20 bp, Artificial Sequence
  Synthetic
gaacttgtcttcaagcttga

SEQ ID NO: 3989 - DNA, 20 bp, Artificial Sequence
  Synthetic
ggtccagttggtttgggact

SEQ ID NO: 3990 - DNA, 20 bp, Artificial Sequence
  Synthetic
gtgtgataggcatgggtggg

SEQ ID NO: 3991 - DNA, 20 bp, Artificial Sequence
  Synthetic
gagctccaaaggagaagggt

SEQ ID NO: 3992 - DNA, 20 bp, Artificial Sequence
  Synthetic
gaaatgcattaaagctgaca

SEQ ID NO: 3993 - DNA, 20 bp, Artificial Sequence
  Synthetic
gaccggctatgccaggactt

SEQ ID NO: 3994 - DNA, 20 bp, Artificial Sequence
  Synthetic
gagctgttcatttaattcca

SEQ ID NO: 3995 - DNA, 20 bp, Artificial Sequence
  Synthetic
gtgggcgagtcctggaggta

SEQ ID NO: 3996 - DNA, 20 bp, Artificial Sequence
  Synthetic
gcagtagcatagagtcacca

SEQ ID NO: 3997 - DNA, 20 bp, Artificial Sequence
  Synthetic
gatccctggagaacaataca

SEQ ID NO: 3998 - DNA, 20 bp, Artificial Sequence
  Synthetic
gctttgttgctaatttccca

SEQ ID NO: 3999 - DNA, 20 bp, Artificial Sequence
  Synthetic
ggtctgggtggtctttgtgg

SEQ ID NO: 4000 - DNA, 20 bp, Artificial Sequence
  Synthetic
gagaaacactaggactttat

SEQ ID NO: 4001 - DNA, 20 bp, Artificial Sequence
  Synthetic
gagcagatagctgggagcct

SEQ ID NO: 4002 - DNA, 20 bp, Artificial Sequence
  Synthetic
gcaaatgctcgcatcgcttt

SEQ ID NO: 4003 - DNA, 20 bp, Artificial Sequence
  Synthetic
gaatgtcttgagcagatagc

SEQ ID NO: 4004 - DNA, 20 bp, Artificial Sequence
  Synthetic
ggctttatctgggatccatt

SEQ ID NO: 4005 - DNA, 20 bp, Artificial Sequence
  Synthetic
gcagtttaaagacctagggc

SEQ ID NO: 4006 - DNA, 20 bp, Artificial Sequence
  Synthetic
gaatctgcatttcctgccct

SEQ ID NO: 4007 - DNA, 20 bp, Artificial Sequence
  Synthetic
gaaacttactttcccagaaa

SEQ ID NO: 4008 - DNA, 20 bp, Artificial Sequence
  Synthetic
gagctctgcctagggaagtg

SEQ ID NO: 4009 - DNA, 20 bp, Artificial Sequence
  Synthetic
gttcgctcctgctctctccc

SEQ ID NO: 4010 - DNA, 20 bp, Artificial Sequence
  Synthetic
gcctctctagaggcaggaac

SEQ ID NO: 4011 - DNA, 20 bp, Artificial Sequence
  Synthetic
gtctgccatccagatagaac

SEQ ID NO: 4012 - DNA, 20 bp, Artificial Sequence
  Synthetic
gatgtgtttattgagtcact

SEQ ID NO: 4013 - DNA, 20 bp, Artificial Sequence
  Synthetic
gggaacgtctgcaggagcaa

SEQ ID NO: 4014 - DNA, 20 bp, Artificial Sequence
  Synthetic
gttaggagaacgcagttagg

SEQ ID NO: 4015 - DNA, 20 bp, Artificial Sequence
  Synthetic
gagtaccatagttctagtgg

SEQ ID NO: 4016 - DNA, 20 bp, Artificial Sequence
  Synthetic
ggccacattagtataggatg

SEQ ID NO: 4017 - DNA, 20 bp, Artificial Sequence
  Synthetic
gggttaggagaacgcagtta

SEQ ID NO: 4018 - DNA, 20 bp, Artificial Sequence
  Synthetic
gggcagcagactggagcatc

SEQ ID NO: 4019 - DNA, 20 bp, Artificial Sequence
  Synthetic
gacagcctggtgtgctgaga

SEQ ID NO: 4020 - DNA, 20 bp, Artificial Sequence
  Synthetic
ggatctggaccgccttctct

SEQ ID NO: 4021 - DNA, 20 bp, Artificial Sequence
  Synthetic
ggatcagatttggagcctga

SEQ ID NO: 4022 - DNA, 20 bp, Artificial Sequence
  Synthetic
ggcctggcagaaatagggcg

SEQ ID NO: 4023 - DNA, 20 bp, Artificial Sequence
  Synthetic
gaacgcagcgacttctccag

SEQ ID NO: 4024 - DNA, 20 bp, Artificial Sequence
  Synthetic
gagccgctcggtttagagct

SEQ ID NO: 4025 - DNA, 20 bp, Artificial Sequence
  Synthetic
ggcgacggcactatttgacg

SEQ ID NO: 4026 - DNA, 20 bp, Artificial Sequence
  Synthetic
ggtcccttagccacaatgaa

SEQ ID NO: 4027 - DNA, 20 bp, Artificial Sequence
  Synthetic
gagaccaagagagtgttaag

SEQ ID NO: 4028 - DNA, 20 bp, Artificial Sequence
  Synthetic
gctcctagggtcgagggatg

SEQ ID NO: 4029 - DNA, 20 bp, Artificial Sequence
  Synthetic
ggtcaaccaaagaattctga

SEQ ID NO: 4030 - DNA, 20 bp, Artificial Sequence
  Synthetic
ggctcccgacatgggactag

SEQ ID NO: 4031 - DNA, 20 bp, Artificial Sequence
  Synthetic
gactagtaagggtcactcga

SEQ ID NO: 4032 - DNA, 20 bp, Artificial Sequence
  Synthetic
gcatttgtcttgtctacttc

SEQ ID NO: 4033 - DNA, 20 bp, Artificial Sequence
  Synthetic
gctttgttgagctaggtccc

SEQ ID NO: 4034 - DNA, 20 bp, Artificial Sequence
  Synthetic
ggaccgctccataagggata

SEQ ID NO: 4035 - DNA, 20 bp, Artificial Sequence
  Synthetic
gtaaagagcagaggttacag

SEQ ID NO: 4036 - DNA, 20 bp, Artificial Sequence
  Synthetic
gggctcctgggatcaaactc

SEQ ID NO: 4037 - DNA, 20 bp, Artificial Sequence
  Synthetic
gcccaatttgtgcgtgtgtt

SEQ ID NO: 4038 - DNA, 20 bp, Artificial Sequence
  Synthetic
gttagtctttaacgtagctt

SEQ ID NO: 4039 - DNA, 20 bp, Artificial Sequence
  Synthetic
ggaggaaatgcctggatagc

SEQ ID NO: 4040 - DNA, 20 bp, Artificial Sequence
  Synthetic
ggctgggcaaagacaaagtg

SEQ ID NO: 4041 - DNA, 20 bp, Artificial Sequence
  Synthetic
gaaggagccagctgaggacc

SEQ ID NO: 4042 - DNA, 20 bp, Artificial Sequence
  Synthetic
gctcaggagagcagttcatc

SEQ ID NO: 4043 - DNA, 20 bp, Artificial Sequence
  Synthetic
ggcctcagaggaccggaaag

SEQ ID NO: 4044 - DNA, 20 bp, Artificial Sequence
  Synthetic
gctagaggagtcactagggt

SEQ ID NO: 4045 - DNA, 20 bp, Artificial Sequence
  Synthetic
gcagttcatcaggtggccac

SEQ ID NO: 4046 - DNA, 20 bp, Artificial Sequence
  Synthetic
gtggtaatgttgtagaagtg

SEQ ID NO: 4047 - DNA, 20 bp, Artificial Sequence
  Synthetic
gctccggaaggagacaattc

SEQ ID NO: 4048 - DNA, 20 bp, Artificial Sequence
  Synthetic
gctgtgctagaggagtcact

SEQ ID NO: 4049 - DNA, 20 bp, Artificial Sequence
  Synthetic
gttattgccacaaatcgggt

SEQ ID NO: 4050 - DNA, 20 bp, Artificial Sequence
  Synthetic
gctctttcaaagggctggca

SEQ ID NO: 4051 - DNA, 20 bp, Artificial Sequence
  Synthetic
ggattctagtgtacattcga

SEQ ID NO: 4052 - DNA, 20 bp, Artificial Sequence
  Synthetic
gtgcgaagtttagtgcacca

SEQ ID NO: 4053 - DNA, 20 bp, Artificial Sequence
  Synthetic
ggaggatggtttgctttcct

SEQ ID NO: 4054 - DNA, 20 bp, Artificial Sequence
  Synthetic
gatcacctcacttgcagaga

SEQ ID NO: 4055 - DNA, 20 bp, Artificial Sequence
  Synthetic
gtgtgcacgttcgagctttc

SEQ ID NO: 4056 - DNA, 20 bp, Artificial Sequence
  Synthetic
gggtttccggacttgtccgg

SEQ ID NO: 4057 - DNA, 20 bp, Artificial Sequence
  Synthetic
gatcccaaccgaagatagaa

SEQ ID NO: 4058 - DNA, 20 bp, Artificial Sequence
  Synthetic
ggaggaggagggcaggattg

SEQ ID NO: 4059 - DNA, 20 bp, Artificial Sequence
  Synthetic
gacctcgtgctctaactcaa

SEQ ID NO: 4060 - DNA, 20 bp, Artificial Sequence
  Synthetic
gtctcctttggaacaggctg

SEQ ID NO: 4061 - DNA, 20 bp, Artificial Sequence
  Synthetic
gctgtggttcatctaggaca

SEQ ID NO: 4062 - DNA, 20 bp, Artificial Sequence
  Synthetic
gggatctggaattctggagg

SEQ ID NO: 4063 - DNA, 20 bp, Artificial Sequence
  Synthetic
ggacactgagggaaggagct

SEQ ID NO: 4064 - DNA, 20 bp, Artificial Sequence
  Synthetic
ggcctggagtctccagaatg

SEQ ID NO: 4065 - DNA, 20 bp, Artificial Sequence
  Synthetic
gaggaacagaaggaggagga

SEQ ID NO: 4066 - DNA, 20 bp, Artificial Sequence
  Synthetic
ggtgtctcagatccattagg

SEQ ID NO: 4067 - DNA, 20 bp, Artificial Sequence
  Synthetic
ggaggctggaccattgaaat

SEQ ID NO: 4068 - DNA, 20 bp, Artificial Sequence
  Synthetic
ggtttagatcagtgaactgc

SEQ ID NO: 4069 - DNA, 20 bp, Artificial Sequence
  Synthetic
ggtgagtgtgtcctagctgc

SEQ ID NO: 4070 - DNA, 20 bp, Artificial Sequence
  Synthetic
ggaggaggaaggcagaacac

SEQ ID NO: 4071 - DNA, 20 bp, Artificial Sequence
  Synthetic
gagccactgagtgcacagac

SEQ ID NO: 4072 - DNA, 20 bp, Artificial Sequence
  Synthetic
gtggcagcctggagagagaa

SEQ ID NO: 4073 - DNA, 20 bp, Artificial Sequence
  Synthetic
gcaaaccctcctgggaacac

SEQ ID NO: 4074 - DNA, 20 bp, Artificial Sequence
  Synthetic
gtggaaaccttacaactccg

SEQ ID NO: 4075 - DNA, 20 bp, Artificial Sequence
  Synthetic
gttgcgcaccgtggccactt

SEQ ID NO: 4076 - DNA, 20 bp, Artificial Sequence
  Synthetic
gcgggccgagtgaatgtgtg

SEQ ID NO: 4077 - DNA, 20 bp, Artificial Sequence
  Synthetic
gtaaggacgcgtcagggacg

SEQ ID NO: 4078 - DNA, 20 bp, Artificial Sequence
  Synthetic
gatcgggaccgcagttcact

SEQ ID NO: 4079 - DNA, 20 bp, Artificial Sequence
  Synthetic
gcaagaactccgaggtttca

SEQ ID NO: 4080 - DNA, 20 bp, Artificial Sequence
  Synthetic
ggtttcacgggtcctgggtc

SEQ ID NO: 4081 - DNA, 20 bp, Artificial Sequence
  Synthetic
ggtttgtttacgtctcccgg

SEQ ID NO: 4082 - DNA, 20 bp, Artificial Sequence
  Synthetic
ggtgacgtcactgcatgact

SEQ ID NO: 4083 - DNA, 20 bp, Artificial Sequence
  Synthetic
gctcgccttacaactgcgcg

SEQ ID NO: 4084 - DNA, 20 bp, Artificial Sequence
  Synthetic
gacaagcacgcactgagcgc

SEQ ID NO: 4085 - DNA, 20 bp, Artificial Sequence
  Synthetic
gaaacaaggctaccagaccc

SEQ ID NO: 4086 - DNA, 20 bp, Artificial Sequence
  Synthetic
gctctgaagcctcttctccc

SEQ ID NO: 4087 - DNA, 20 bp, Artificial Sequence
  Synthetic
gacctgtgagttggaggcaa

SEQ ID NO: 4088 - DNA, 20 bp, Artificial Sequence
  Synthetic
ggctgatccttgcttgctgt

SEQ ID NO: 4089 - DNA, 20 bp, Artificial Sequence
  Synthetic
gggctctggaccactcattc

SEQ ID NO: 4090 - DNA, 20 bp, Artificial Sequence
  Synthetic
gaccgtgctcctgcagagac

SEQ ID NO: 4091 - DNA, 20 bp, Artificial Sequence
  Synthetic
gcacaggaaagtgcagagtg

SEQ ID NO: 4092 - DNA, 20 bp, Artificial Sequence
  Synthetic
ggtgtatgtgtgttgagggt

SEQ ID NO: 4093 - DNA, 20 bp, Artificial Sequence
  Synthetic
gcctcagggctcagggttaa

SEQ ID NO: 4094 - DNA, 20 bp, Artificial Sequence
  Synthetic
ggagaacggctcaggaaggg

SEQ ID NO: 4095 - DNA, 20 bp, Artificial Sequence
  Synthetic
ggagagaagacctacgtagg

SEQ ID NO: 4096 - DNA, 20 bp, Artificial Sequence
  Synthetic
gccattcagggtcacagaga

SEQ ID NO: 4097 - DNA, 20 bp, Artificial Sequence
  Synthetic
ggtggtggcagtgaggatga

SEQ ID NO: 4098 - DNA, 20 bp, Artificial Sequence
  Synthetic
gtcaggttagaggcagaggg

SEQ ID NO: 4099 - DNA, 20 bp, Artificial Sequence
  Synthetic
ggaaggtgcctggaagaagg

SEQ ID NO: 4100 - DNA, 20 bp, Artificial Sequence
  Synthetic
ggactgccaggatgtcgtgc

SEQ ID NO: 4101 - DNA, 20 bp, Artificial Sequence
  Synthetic
ggtgaaggcacttagggtga

SEQ ID NO: 4102 - DNA, 20 bp, Artificial Sequence
  Synthetic
gtttctggtctcccagaatg

SEQ ID NO: 4103 - DNA, 20 bp, Artificial Sequence
  Synthetic
gaggctgacagcagggtgca

SEQ ID NO: 4104 - DNA, 20 bp, Artificial Sequence
  Synthetic
gtgctgaggaactgcttccg

SEQ ID NO: 4105 - DNA, 20 bp, Artificial Sequence
  Synthetic
gtaaggagggaggagggatt

SEQ ID NO: 4106 - DNA, 20 bp, Artificial Sequence
  Synthetic
gacatcactaatgttgttat

SEQ ID NO: 4107 - DNA, 20 bp, Artificial Sequence
  Synthetic
gctttgtagccaggatgggt

SEQ ID NO: 4108 - DNA, 20 bp, Artificial Sequence
  Synthetic
gtgtctatgtcctctcagca

SEQ ID NO: 4109 - DNA, 20 bp, Artificial Sequence
  Synthetic
gatctagcccgtggtggcta

SEQ ID NO: 4110 - DNA, 20 bp, Artificial Sequence
  Synthetic
ggatcgaagcgtcagcactt

SEQ ID NO: 4111 - DNA, 20 bp, Artificial Sequence
  Synthetic
ggagaaccacacagcctggc

SEQ ID NO: 4112 - DNA, 20 bp, Artificial Sequence
  Synthetic
gagtcccagaccttacaggc

SEQ ID NO: 4113 - DNA, 20 bp, Artificial Sequence
  Synthetic
gtcctgctccatttatgtga

SEQ ID NO: 4114 - DNA, 20 bp, Artificial Sequence
  Synthetic
gaacctaaagccagaggcct

SEQ ID NO: 4115 - DNA, 20 bp, Artificial Sequence
  Synthetic
gctccatttatgtgaagggc

SEQ ID NO: 4116 - DNA, 20 bp, Artificial Sequence
  Synthetic
gacggaggaggtcactacca

SEQ ID NO: 4117 - DNA, 20 bp, Artificial Sequence
  Synthetic
ggacacatcatgccattcct

SEQ ID NO: 4118 - DNA, 20 bp, Artificial Sequence
  Synthetic
gtttctgcactcaatagtca

SEQ ID NO: 4119 - DNA, 20 bp, Artificial Sequence
  Synthetic
gccagatttcagggagggtg

SEQ ID NO: 4120 - DNA, 20 bp, Artificial Sequence
  Synthetic
gacttgtagtcctcgagcgt

SEQ ID NO: 4121 - DNA, 20 bp, Artificial Sequence
  Synthetic
gagaaactacaaatcccatc

SEQ ID NO: 4122 - DNA, 20 bp, Artificial Sequence
  Synthetic
gagatgccagatttcaggga

SEQ ID NO: 4123 - DNA, 20 bp, Artificial Sequence
  Synthetic
gataccagaagtagagacaa

SEQ ID NO: 4124 - DNA, 20 bp, Artificial Sequence
  Synthetic
gaatctagtttaggctttgt

SEQ ID NO: 4125 - DNA, 20 bp, Artificial Sequence
  Synthetic
ggctgtaagggagacaaaga

SEQ ID NO: 4126 - DNA, 20 bp, Artificial Sequence
  Synthetic
ggaaggcatctctgggaagc

SEQ ID NO: 4127 - DNA, 20 bp, Artificial Sequence
  Synthetic
gggacaggagggactctaga

SEQ ID NO: 4128 - DNA, 20 bp, Artificial Sequence
  Synthetic
gggttgttacctcactgaag

SEQ ID NO: 4129 - DNA, 20 bp, Artificial Sequence
  Synthetic
gaagggagtggacacagcac

SEQ ID NO: 4130 - DNA, 20 bp, Artificial Sequence
  Synthetic
gggtcaggatcaagctctgc

SEQ ID NO: 4131 - DNA, 20 bp, Artificial Sequence
  Synthetic
gaggacttggaacaggtgga

SEQ ID NO: 4132 - DNA, 20 bp, Artificial Sequence
  Synthetic
gttgctgggatccatggcgg

SEQ ID NO: 4133 - DNA, 20 bp, Artificial Sequence
  Synthetic
gaaataacggccgctggcgg

SEQ ID NO: 4134 - DNA, 20 bp, Artificial Sequence
  Synthetic
gacacacaagaggctggagc

SEQ ID NO: 4135 - DNA, 20 bp, Artificial Sequence
  Synthetic
gcagccaatccaaacacaag

SEQ ID NO: 4136 - DNA, 20 bp, Artificial Sequence
  Synthetic
gcctgtctcagagatgagtg

SEQ ID NO: 4137 - DNA, 20 bp, Artificial Sequence
  Synthetic
gtgtacagatggagaaacca

SEQ ID NO: 4138 - DNA, 20 bp, Artificial Sequence
  Synthetic
gagtggcagaagtgtacaga

SEQ ID NO: 4139 - DNA, 20 bp, Artificial Sequence
  Synthetic
gaccagtgaccttcatgcag

SEQ ID NO: 4140 - DNA, 20 bp, Artificial Sequence
  Synthetic
gtgtcgtgaaggcagaggct

SEQ ID NO: 4141 - DNA, 20 bp, Artificial Sequence
  Synthetic
ggctcttgatataaacctcc

SEQ ID NO: 4142 - DNA, 20 bp, Artificial Sequence
  Synthetic
gtggccctgactccaaggtc

SEQ ID NO: 4143 - DNA, 20 bp, Artificial Sequence
  Synthetic
gggagtttgtgcaggagtgg

SEQ ID NO: 4144 - DNA, 20 bp, Artificial Sequence
  Synthetic
gcaaacaaaggctctgagct

SEQ ID NO: 4145 - DNA, 20 bp, Artificial Sequence
  Synthetic
gattctcaggcagggctcta

SEQ ID NO: 4146 - DNA, 20 bp, Artificial Sequence
  Synthetic
gaccagttcactgaaagatg

SEQ ID NO: 4147 - DNA, 20 bp, Artificial Sequence
  Synthetic
ggcagttctcttgcctagtg

SEQ ID NO: 4148 - DNA, 20 bp, Artificial Sequence
  Synthetic
gtagtttggaagctctgaag

SEQ ID NO: 4149 - DNA, 20 bp, Artificial Sequence
  Synthetic
ggcttccctgcattgatctt

SEQ ID NO: 4150 - DNA, 20 bp, Artificial Sequence
  Synthetic
gtgtttctgtcttctcttgg

SEQ ID NO: 4151 - DNA, 20 bp, Artificial Sequence
  Synthetic
gatggcaatcgccgaggagg

SEQ ID NO: 4152 - DNA, 20 bp, Artificial Sequence
  Synthetic
gtggtgggtattcttagatg

SEQ ID NO: 4153 - DNA, 20 bp, Artificial Sequence
  Synthetic
gttactattggagagaggca

SEQ ID NO: 4154 - DNA, 20 bp, Artificial Sequence
  Synthetic
gggaagtgagaagggtggat

SEQ ID NO: 4155 - DNA, 20 bp, Artificial Sequence
  Synthetic
gatacgagattaccagacac

SEQ ID NO: 4156 - DNA, 20 bp, Artificial Sequence
  Synthetic
gagggtttgtgcccattgca

SEQ ID NO: 4157 - DNA, 20 bp, Artificial Sequence
  Synthetic
gatgtgcacaaagcagccat

SEQ ID NO: 4158 - DNA, 20 bp, Artificial Sequence
  Synthetic
gcaaacagaaggcagggatg

SEQ ID NO: 4159 - DNA, 20 bp, Artificial Sequence
  Synthetic
gaagttacaaaggaagctgg

SEQ ID NO: 4160 - DNA, 20 bp, Artificial Sequence
  Synthetic
gctggatccttgctgtgacc

SEQ ID NO: 4161 - DNA, 20 bp, Artificial Sequence
  Synthetic
gcccgggagagaagaaagag

SEQ ID NO: 4162 - DNA, 20 bp, Artificial Sequence
  Synthetic
ggtaataagaatgtgatggc

SEQ ID NO: 4163 - DNA, 20 bp, Artificial Sequence
  Synthetic
gaggactgcaaacagaaggc

SEQ ID NO: 4164 - DNA, 20 bp, Artificial Sequence
  Synthetic
gcagggactcagcattgctc

SEQ ID NO: 4165 - DNA, 20 bp, Artificial Sequence
  Synthetic
gggccagaggaagacccaag

SEQ ID NO: 4166 - DNA, 20 bp, Artificial Sequence
  Synthetic
gcagagggaaagtcactgtg

SEQ ID NO: 4167 - DNA, 20 bp, Artificial Sequence
  Synthetic
gacaaagctggagctggctg

SEQ ID NO: 4168 - DNA, 20 bp, Artificial Sequence
  Synthetic
gctgcactagaatgctgttg

SEQ ID NO: 4169 - DNA, 20 bp, Artificial Sequence
  Synthetic
gtcctcccagttgctccagt

SEQ ID NO: 4170 - DNA, 20 bp, Artificial Sequence
  Synthetic
gaatgtcagggtcagaggtc

SEQ ID NO: 4171 - DNA, 20 bp, Artificial Sequence
  Synthetic
ggaagtaaggcccagaaatg

SEQ ID NO: 4172 - DNA, 20 bp, Artificial Sequence
  Synthetic
gtcatcgcctctggctattc

SEQ ID NO: 4173 - DNA, 20 bp, Artificial Sequence
  Synthetic
gctcgcctctggctttgcag

SEQ ID NO: 4174 - DNA, 20 bp, Artificial Sequence
  Synthetic
gtgaagggctttgggatgtg

SEQ ID NO: 4175 - DNA, 20 bp, Artificial Sequence
  Synthetic
gatactgggtgatgccattc

SEQ ID NO: 4176 - DNA, 20 bp, Artificial Sequence
  Synthetic
gttggcttcagtcttggtcg

SEQ ID NO: 4177 - DNA, 20 bp, Artificial Sequence
  Synthetic
gcttgtaactctaagagact

SEQ ID NO: 4178 - DNA, 20 bp, Artificial Sequence
  Synthetic
gctaaaccaggtacatttaa

SEQ ID NO: 4179 - DNA, 20 bp, Artificial Sequence
  Synthetic
gatatcagcaagtgttcagc

SEQ ID NO: 4180 - DNA, 20 bp, Artificial Sequence
  Synthetic
gaaagctagaagacagagga

SEQ ID NO: 4181 - DNA, 20 bp, Artificial Sequence
  Synthetic
gagttacaagctttctaatt

SEQ ID NO: 4182 - DNA, 20 bp, Artificial Sequence
  Synthetic
gtgtgatgagagaaagaaac

SEQ ID NO: 4183 - DNA, 20 bp, Artificial Sequence
  Synthetic
gagaatgtttctctacactt

SEQ ID NO: 4184 - DNA, 20 bp, Artificial Sequence
  Synthetic
gtcatggcacttaaacgatt

SEQ ID NO: 4185 - DNA, 20 bp, Artificial Sequence
  Synthetic
gcttctggatgtttcctgtg

SEQ ID NO: 4186 - DNA, 20 bp, Artificial Sequence
  Synthetic
ggaaatgacagagtctggcg

SEQ ID NO: 4187 - DNA, 20 bp, Artificial Sequence
  Synthetic
gagagtgatggacaagcagg

SEQ ID NO: 4188 - DNA, 20 bp, Artificial Sequence
  Synthetic
gtccctgttctggcttcttg

SEQ ID NO: 4189 - DNA, 20 bp, Artificial Sequence
  Synthetic
gccattgggtcccagcttgt

SEQ ID NO: 4190 - DNA, 20 bp, Artificial Sequence
  Synthetic
gcagaatagtcctattgaac

SEQ ID NO: 4191 - DNA, 20 bp, Artificial Sequence
  Synthetic
gtcacaggtagagggagcag

SEQ ID NO: 4192 - DNA, 20 bp, Artificial Sequence
  Synthetic
gaggcaagggaggtagtggt

SEQ ID NO: 4193 - DNA, 20 bp, Artificial Sequence
  Synthetic
gcctagcttgcgagatggga

SEQ ID NO: 4194 - DNA, 20 bp, Artificial Sequence
  Synthetic
gaactgtccagatggcgcag

SEQ ID NO: 4195 - DNA, 20 bp, Artificial Sequence
  Synthetic
gtgtaagacgcgacctgtta

SEQ ID NO: 4196 - DNA, 20 bp, Artificial Sequence
  Synthetic
gcgtcgccgctgaaagagct

SEQ ID NO: 4197 - DNA, 20 bp, Artificial Sequence
  Synthetic
gtcaaagccagagcaagaag

SEQ ID NO: 4198 - DNA, 20 bp, Artificial Sequence
  Synthetic
gagcaccggtgaaattccca

SEQ ID NO: 4199 - DNA, 20 bp, Artificial Sequence
  Synthetic
gtgaacatatgtcaaccttc

SEQ ID NO: 4200 - DNA, 20 bp, Artificial Sequence
  Synthetic
gagggctgcaagagaggagg

SEQ ID NO: 4201 - DNA, 20 bp, Artificial Sequence
  Synthetic
gccgcattggtctggagctg

SEQ ID NO: 4202 - DNA, 20 bp, Artificial Sequence
  Synthetic
gccagagcaagaagaggagc

SEQ ID NO: 4203 - DNA, 20 bp, Artificial Sequence
  Synthetic
gggaatgcaaactgccattc

SEQ ID NO: 4204 - DNA, 20 bp, Artificial Sequence
  Synthetic
gcaatctaagccacgagagc

SEQ ID NO: 4205 - DNA, 20 bp, Artificial Sequence
  Synthetic
gagtgagtgtcagtaggtgt

SEQ ID NO: 4206 - DNA, 20 bp, Artificial Sequence
  Synthetic
gaactcggagcatagtccct

SEQ ID NO: 4207 - DNA, 20 bp, Artificial Sequence
  Synthetic
gctcgtaaccttcagttcgg

SEQ ID NO: 4208 - DNA, 20 bp, Artificial Sequence
  Synthetic
gcaggagccaagaggagtgg

SEQ ID NO: 4209 - DNA, 20 bp, Artificial Sequence
  Synthetic
gggtcctgggctcaatctgg

SEQ ID NO: 4210 - DNA, 20 bp, Artificial Sequence
  Synthetic
gtcagtaggtgttggcaggt

SEQ ID NO: 4211 - DNA, 20 bp, Artificial Sequence
  Synthetic
gctcaaagggagagaaggca

SEQ ID NO: 4212 - DNA, 20 bp, Artificial Sequence
  Synthetic
gaaagcagcgcctcctgcaa

SEQ ID NO: 4213 - DNA, 20 bp, Artificial Sequence
  Synthetic
gatataaatcctctcctaca

SEQ ID NO: 4214 - DNA, 20 bp, Artificial Sequence
  Synthetic
gttggcaggttggctgcagc

SEQ ID NO: 4215 - DNA, 20 bp, Artificial Sequence
  Synthetic
gtctgagctaggaagactta

SEQ ID NO: 4216 - DNA, 20 bp, Artificial Sequence
  Synthetic
gagaggcggtgacttcggga

SEQ ID NO: 4217 - DNA, 20 bp, Artificial Sequence
  Synthetic
ggcacactcaggacaataag

SEQ ID NO: 4218 - DNA, 20 bp, Artificial Sequence
  Synthetic
gtggtggtgacagaaataag

SEQ ID NO: 4219 - DNA, 20 bp, Artificial Sequence
  Synthetic
gactgcacagccatggctaa

SEQ ID NO: 4220 - DNA, 20 bp, Artificial Sequence
  Synthetic
gagccacctcactcagtcta

SEQ ID NO: 4221 - DNA, 20 bp, Artificial Sequence
  Synthetic
ggcctgagaggctatggagg

SEQ ID NO: 4222 - DNA, 20 bp, Artificial Sequence
  Synthetic
gagctgctgtgcttccctca

SEQ ID NO: 4223 - DNA, 20 bp, Artificial Sequence
  Synthetic
ggctaggcagagaggacctg

SEQ ID NO: 4224 - DNA, 20 bp, Artificial Sequence
  Synthetic
gcagtgaggaccaagaggga

SEQ ID NO: 4225 - DNA, 20 bp, Artificial Sequence
  Synthetic
gtgagatggaaggagcccac

SEQ ID NO: 4226 - DNA, 20 bp, Artificial Sequence
  Synthetic
gttccctgtcaaggccctgt

SEQ ID NO: 4227 - DNA, 20 bp, Artificial Sequence
  Synthetic
gacatggaggcaggaaccca

SEQ ID NO: 4228 - DNA, 20 bp, Artificial Sequence
  Synthetic
gctgacaaatgggttgctgt

SEQ ID NO: 4229 - DNA, 20 bp, Artificial Sequence
  Synthetic
gaggtgaggtgtgctgtccc

SEQ ID NO: 4230 - DNA, 20 bp, Artificial Sequence
  Synthetic
gtgattagcccggagaggtg

SEQ ID NO: 4231 - DNA, 20 bp, Artificial Sequence
  Synthetic
ggtagagagtctttaaatca

SEQ ID NO: 4232 - DNA, 20 bp, Artificial Sequence
  Synthetic
gtctacgctatacctatacc

SEQ ID NO: 4233 - DNA, 20 bp, Artificial Sequence
  Synthetic
gagacaaagatggatggagg

SEQ ID NO: 4234 - DNA, 20 bp, Artificial Sequence
  Synthetic
gcttgtgtatgtgctgtgtt

SEQ ID NO: 4235 - DNA, 20 bp, Artificial Sequence
  Synthetic
gtcctgcaattgcatgactt

SEQ ID NO: 4236 - DNA, 20 bp, Artificial Sequence
  Synthetic
ggaacctatgggacagattg

SEQ ID NO: 4237 - DNA, 20 bp, Artificial Sequence
  Synthetic
gggatgtctgcagtagccta

SEQ ID NO: 4238 - DNA, 20 bp, Artificial Sequence
  Synthetic
ggttccagcgtaaacacatt

SEQ ID NO: 4239 - DNA, 20 bp, Artificial Sequence
  Synthetic
gtttgcatgtggtcagcgct

SEQ ID NO: 4240 - DNA, 20 bp, Artificial Sequence
  Synthetic
gcagcaaggctttgacggta

SEQ ID NO: 4241 - DNA, 20 bp, Artificial Sequence
  Synthetic
gtcctgccagcaatgggaac

SEQ ID NO: 4242 - DNA, 20 bp, Artificial Sequence
  Synthetic
ggagcttccaccacagctag

SEQ ID NO: 4243 - DNA, 20 bp, Artificial Sequence
  Synthetic
gatttcatttctcaaaggat

SEQ ID NO: 4244 - DNA, 20 bp, Artificial Sequence
  Synthetic
gagacactgtgtgctggctt

SEQ ID NO: 4245 - DNA, 20 bp, Artificial Sequence
  Synthetic
gtatacagcaaattggctaa

SEQ ID NO: 4246 - DNA, 20 bp, Artificial Sequence
  Synthetic
gaatgacttccagccctccc

SEQ ID NO: 4247 - DNA, 20 bp, Artificial Sequence
  Synthetic
gaagtggaaatggaaggagg

SEQ ID NO: 4248 - DNA, 20 bp, Artificial Sequence
  Synthetic
gagagcccttgggcagtgac

SEQ ID NO: 4249 - DNA, 20 bp, Artificial Sequence
  Synthetic
ggctgggaagtggaaatgga

SEQ ID NO: 4250 - DNA, 20 bp, Artificial Sequence
  Synthetic
ggaaaggcctggaggtggga

SEQ ID NO: 4251 - DNA, 20 bp, Artificial Sequence
  Synthetic
gaagggaaaggcctggaggt

SEQ ID NO: 4252 - DNA, 20 bp, Artificial Sequence
  Synthetic
gcaatttcaggattaatcca

SEQ ID NO: 4253 - DNA, 20 bp, Artificial Sequence
  Synthetic
gcattgtttcattagggaga

SEQ ID NO: 4254 - DNA, 20 bp, Artificial Sequence
  Synthetic
gaggcacgggatagacatcc

SEQ ID NO: 4255 - DNA, 20 bp, Artificial Sequence
  Synthetic
gaatgtctgccctcacattc

SEQ ID NO: 4256 - DNA, 20 bp, Artificial Sequence
  Synthetic
ggaaaccaagaatgtaagga

SEQ ID NO: 4257 - DNA, 20 bp, Artificial Sequence
  Synthetic
ggaaaggagagacaggagag

SEQ ID NO: 4258 - DNA, 20 bp, Artificial Sequence
  Synthetic
gaagcttcataagttctttc

SEQ ID NO: 4259 - DNA, 20 bp, Artificial Sequence
  Synthetic
gtttggcctcctgatgttgg

SEQ ID NO: 4260 - DNA, 20 bp, Artificial Sequence
  Synthetic
gagtcttgttgggaaaggcc

SEQ ID NO: 4261 - DNA, 20 bp, Artificial Sequence
  Synthetic
gctctagaaattgtgagaag

SEQ ID NO: 4262 - DNA, 20 bp, Artificial Sequence
  Synthetic
gttggaaagtaccagaacac

SEQ ID NO: 4263 - DNA, 20 bp, Artificial Sequence
  Synthetic
ggcttgaaacttaaccttcc

SEQ ID NO: 4264 - DNA, 20 bp, Artificial Sequence
  Synthetic
gtttgagatgtgactgacat

SEQ ID NO: 4265 - DNA, 20 bp, Artificial Sequence
  Synthetic
ggcaaatcacagaatgtccc

SEQ ID NO: 4266 - DNA, 20 bp, Artificial Sequence
  Synthetic
gcaaatcacagaatgtccca

SEQ ID NO: 4267 - DNA, 20 bp, Artificial Sequence
  Synthetic
gctatctttgcactttggag

SEQ ID NO: 4268 - DNA, 20 bp, Artificial Sequence
  Synthetic
gcacgtttatggttcttgat

SEQ ID NO: 4269 - DNA, 20 bp, Artificial Sequence
  Synthetic
gtgtgaggctagaaatcttt

SEQ ID NO: 4270 - DNA, 20 bp, Artificial Sequence
  Synthetic
gtgcataggtgtgagattgg

SEQ ID NO: 4271 - DNA, 20 bp, Artificial Sequence
  Synthetic
ggagttcagcaggagcccat

SEQ ID NO: 4272 - DNA, 20 bp, Artificial Sequence
  Synthetic
gggctctgcaaatgggcaga

SEQ ID NO: 4273 - DNA, 20 bp, Artificial Sequence
  Synthetic
gagccctcccttccaaattg

SEQ ID NO: 4274 - DNA, 20 bp, Artificial Sequence
  Synthetic
gttctgctgctcatgaccct

SEQ ID NO: 4275 - DNA, 20 bp, Artificial Sequence
  Synthetic
ggaagaggtaagacgcactt

SEQ ID NO: 4276 - DNA, 20 bp, Artificial Sequence
  Synthetic
ggtgtactgggaagaaggca

SEQ ID NO: 4277 - DNA, 20 bp, Artificial Sequence
  Synthetic
gagccgctcttgtcttcagc

SEQ ID NO: 4278 - DNA, 20 bp, Artificial Sequence
  Synthetic
gtccctttctaggagaccat

SEQ ID NO: 4279 - DNA, 20 bp, Artificial Sequence
  Synthetic
ggtcagatttcctgtttgta

SEQ ID NO: 4280 - DNA, 20 bp, Artificial Sequence
  Synthetic
gacctcaattaatctaacac

SEQ ID NO: 4281 - DNA, 20 bp, Artificial Sequence
  Synthetic
ggtccaagaggatagatatt

SEQ ID NO: 4282 - DNA, 20 bp, Artificial Sequence
  Synthetic
gtctgactcttaagagtaag

SEQ ID NO: 4283 - DNA, 20 bp, Artificial Sequence
  Synthetic
gagagttaactaaggtggga

SEQ ID NO: 4284 - DNA, 20 bp, Artificial Sequence
  Synthetic
gaagggcaaggctgagggag

SEQ ID NO: 4285 - DNA, 20 bp, Artificial Sequence
  Synthetic
gtcttctttgtgacctgtaa

SEQ ID NO: 4286 - DNA, 20 bp, Artificial Sequence
  Synthetic
ggtgctttaggatgggcggt

SEQ ID NO: 4287 - DNA, 20 bp, Artificial Sequence
  Synthetic
gatggaaagaagaagaatga

SEQ ID NO: 4288 - DNA, 20 bp, Artificial Sequence
  Synthetic
ggcacaggtttggttcactg

SEQ ID NO: 4289 - DNA, 20 bp, Artificial Sequence
  Synthetic
gttagatgggtaagggcgcg

SEQ ID NO: 4290 - DNA, 20 bp, Artificial Sequence
  Synthetic
gagattggagaatgcggttc

SEQ ID NO: 4291 - DNA, 20 bp, Artificial Sequence
  Synthetic
gtgttctcggaggaaagagg

SEQ ID NO: 4292 - DNA, 20 bp, Artificial Sequence
  Synthetic
ggtagaaagcagagacagtt

SEQ ID NO: 4293 - DNA, 20 bp, Artificial Sequence
  Synthetic
gactggagaggagggacagg

SEQ ID NO: 4294 - DNA, 20 bp, Artificial Sequence
  Synthetic
gccagcctggaccttgactg

SEQ ID NO: 4295 - DNA, 20 bp, Artificial Sequence
  Synthetic
gctgcctgtgcgctaagaga

SEQ ID NO: 4296 - DNA, 20 bp, Artificial Sequence
  Synthetic
gggacagtgccaaggaagcc

SEQ ID NO: 4297 - DNA, 20 bp, Artificial Sequence
  Synthetic
gggcctttgttcctgcagac

SEQ ID NO: 4298 - DNA, 20 bp, Artificial Sequence
  Synthetic
gaagggttgtcctgggtgtg

SEQ ID NO: 4299 - DNA, 20 bp, Artificial Sequence
  Synthetic
gcggttcgagagtgtccaag

SEQ ID NO: 4300 - DNA, 20 bp, Artificial Sequence
  Synthetic
gctctcttctcttacgcctc

SEQ ID NO: 4301 - DNA, 20 bp, Artificial Sequence
  Synthetic
gactggcacctgcaaaggga

SEQ ID NO: 4302 - DNA, 20 bp, Artificial Sequence
  Synthetic
gggttgggcataagcaaagg

SEQ ID NO: 4303 - DNA, 20 bp, Artificial Sequence
  Synthetic
gcttctgagcctctctctcc

SEQ ID NO: 4304 - DNA, 20 bp, Artificial Sequence
  Synthetic
gcactcacgcactcctggtg

SEQ ID NO: 4305 - DNA, 20 bp, Artificial Sequence
  Synthetic
gacctcatttctgagttggg

SEQ ID NO: 4306 - DNA, 20 bp, Artificial Sequence
  Synthetic
gacaactgactttggtctag

SEQ ID NO: 4307 - DNA, 20 bp, Artificial Sequence
  Synthetic
ggccggcagtgtagctatgg

SEQ ID NO: 4308 - DNA, 20 bp, Artificial Sequence
  Synthetic
gagaccagaagtagggaggg

SEQ ID NO: 4309 - DNA, 20 bp, Artificial Sequence
  Synthetic
gcctgggatatgaaaccttt

SEQ ID NO: 4310 - DNA, 20 bp, Artificial Sequence
  Synthetic
gagactggaagatgggagga

SEQ ID NO: 4311 - DNA, 20 bp, Artificial Sequence
  Synthetic
gtctgggaggttgggaagga

SEQ ID NO: 4312 - DNA, 20 bp, Artificial Sequence
  Synthetic
gcttccctggatctgtggga

SEQ ID NO: 4313 - DNA, 20 bp, Artificial Sequence
  Synthetic
gctctgagccaggttggttg

SEQ ID NO: 4314 - DNA, 20 bp, Artificial Sequence
  Synthetic
gtccaggttgctctgaggac

SEQ ID NO: 4315 - DNA, 20 bp, Artificial Sequence
  Synthetic
gttcaataggacagagaatg

SEQ ID NO: 4316 - DNA, 20 bp, Artificial Sequence
  Synthetic
gtgttcaataggacagagaa

SEQ ID NO: 4317 - DNA, 20 bp, Artificial Sequence
  Synthetic
gtagctgtctgtgaagatgg

SEQ ID NO: 4318 - DNA, 20 bp, Artificial Sequence
  Synthetic
gagctaaaggtgattagagg

SEQ ID NO: 4319 - DNA, 20 bp, Artificial Sequence
  Synthetic
gtgtgtggatgccaaacaat

SEQ ID NO: 4320 - DNA, 20 bp, Artificial Sequence
  Synthetic
gagctgaacctacagaggtg

SEQ ID NO: 4321 - DNA, 20 bp, Artificial Sequence
  Synthetic
ggaaggctgttgggtgggag

SEQ ID NO: 4322 - DNA, 20 bp, Artificial Sequence
  Synthetic
gggttggagcacgttcaaga

SEQ ID NO: 4323 - DNA, 20 bp, Artificial Sequence
  Synthetic
ggccatatcaggacaaggag

SEQ ID NO: 4324 - DNA, 20 bp, Artificial Sequence
  Synthetic
gggacagctgatctaagtgc

SEQ ID NO: 4325 - DNA, 20 bp, Artificial Sequence
  Synthetic
gttagtgatacattgatgta

SEQ ID NO: 4326 - DNA, 20 bp, Artificial Sequence
  Synthetic
gagcaactgcacttgctgac

SEQ ID NO: 4327 - DNA, 20 bp, Artificial Sequence
  Synthetic
gagtatggaagtcatcctcc

SEQ ID NO: 4328 - DNA, 20 bp, Artificial Sequence
  Synthetic
gcaaattataaagaagaggg

SEQ ID NO: 4329 - DNA, 20 bp, Artificial Sequence
  Synthetic
gtgagtacatgttaaactct

SEQ ID NO: 4330 - DNA, 20 bp, Artificial Sequence
  Synthetic
gctaaaggaaactttccagg

SEQ ID NO: 4331 - DNA, 20 bp, Artificial Sequence
  Synthetic
gttgggtgctttaaagtatg

SEQ ID NO: 4332 - DNA, 20 bp, Artificial Sequence
  Synthetic
ggttctctctgttacaggct

SEQ ID NO: 4333 - DNA, 20 bp, Artificial Sequence
  Synthetic
gtaccttgatgattcgagac

SEQ ID NO: 4334 - DNA, 20 bp, Artificial Sequence
  Synthetic
gagtctatcgagggaaacag

SEQ ID NO: 4335 - DNA, 20 bp, Artificial Sequence
  Synthetic
gagatcaagtgtaggtaaga

SEQ ID NO: 4336 - DNA, 20 bp, Artificial Sequence
  Synthetic
gagtccatctggaagaagcc

SEQ ID NO: 4337 - DNA, 20 bp, Artificial Sequence
  Synthetic
gactttagtagagtctatcg

SEQ ID NO: 4338 - DNA, 20 bp, Artificial Sequence
  Synthetic
gcatgccaccctattcttct

SEQ ID NO: 4339 - DNA, 20 bp, Artificial Sequence
  Synthetic
gtaggtcagaagtcctctgc

SEQ ID NO: 4340 - DNA, 20 bp, Artificial Sequence
  Synthetic
gaatgattcggtgggctgca

SEQ ID NO: 4341 - DNA, 20 bp, Artificial Sequence
  Synthetic
gctctgaaaggctgctaaga

SEQ ID NO: 4342 - DNA, 20 bp, Artificial Sequence
  Synthetic
gatggcaacttgcagaaaga

SEQ ID NO: 4343 - DNA, 20 bp, Artificial Sequence
  Synthetic
gctctagaaacacactggag

SEQ ID NO: 4344 - DNA, 20 bp, Artificial Sequence
  Synthetic
gagccacagctgcctcacca

SEQ ID NO: 4345 - DNA, 20 bp, Artificial Sequence
  Synthetic
gtcttcctaagaatggattg

SEQ ID NO: 4346 - DNA, 20 bp, Artificial Sequence
  Synthetic
ggctcgcaggtggatagtag

SEQ ID NO: 4347 - DNA, 20 bp, Artificial Sequence
  Synthetic
gtggaggccaagtcggctct

SEQ ID NO: 4348 - DNA, 20 bp, Artificial Sequence
  Synthetic
gacgccgatgacactgggac

SEQ ID NO: 4349 - DNA, 20 bp, Artificial Sequence
  Synthetic
gatctgccgcttctcttgag

SEQ ID NO: 4350 - DNA, 20 bp, Artificial Sequence
  Synthetic
gagatctgccgcttctcttg

SEQ ID NO: 4351 - DNA, 20 bp, Artificial Sequence
  Synthetic
ggaggaaggagccgctggaa

SEQ ID NO: 4352 - DNA, 20 bp, Artificial Sequence
  Synthetic
ggaagcctctgcagggatca

SEQ ID NO: 4353 - DNA, 20 bp, Artificial Sequence
  Synthetic
gaagagttggctcccaccat

SEQ ID NO: 4354 - DNA, 20 bp, Artificial Sequence
  Synthetic
gcgggtctggtgccaggtaa

SEQ ID NO: 4355 - DNA, 20 bp, Artificial Sequence
  Synthetic
ggtgggagccaactcttccc

SEQ ID NO: 4356 - DNA, 20 bp, Artificial Sequence
  Synthetic
ggtatggtgatacccatctt

SEQ ID NO: 4357 - DNA, 20 bp, Artificial Sequence
  Synthetic
ggagtagagccactaagcag

SEQ ID NO: 4358 - DNA, 20 bp, Artificial Sequence
  Synthetic
ggatccaggtgttctgagac

SEQ ID NO: 4359 - DNA, 20 bp, Artificial Sequence
  Synthetic
gaagacatttccaccgggag

SEQ ID NO: 4360 - DNA, 20 bp, Artificial Sequence
  Synthetic
gtgtggaactttctttgggt

SEQ ID NO: 4361 - DNA, 20 bp, Artificial Sequence
  Synthetic
gcagaggttatgtatggtta

SEQ ID NO: 4362 - DNA, 20 bp, Artificial Sequence
  Synthetic
gcgggtgaggcttctcagca

SEQ ID NO: 4363 - DNA, 20 bp, Artificial Sequence
  Synthetic
gttgcagagtctgtgaggga

SEQ ID NO: 4364 - DNA, 20 bp, Artificial Sequence
  Synthetic
gacctgtttcaaacgaagcc

SEQ ID NO: 4365 - DNA, 20 bp, Artificial Sequence
  Synthetic
ggcatatcaccatttctctg

SEQ ID NO: 4366 - DNA, 20 bp, Artificial Sequence
  Synthetic
gcttggaaatttccaaacca

SEQ ID NO: 4367 - DNA, 20 bp, Artificial Sequence
  Synthetic
gccatattattgacccatta

SEQ ID NO: 4368 - DNA, 20 bp, Artificial Sequence
  Synthetic
gccacatagtgaatgggacc

SEQ ID NO: 4369 - DNA, 20 bp, Artificial Sequence
  Synthetic
gcaggtgctgcaaaccagga

SEQ ID NO: 4370 - DNA, 20 bp, Artificial Sequence
  Synthetic
gtgatatgccacatagtgaa

SEQ ID NO: 4371 - DNA, 20 bp, Artificial Sequence
  Synthetic
gttgcatatattctccctaa

SEQ ID NO: 4372 - DNA, 20 bp, Artificial Sequence
  Synthetic
gttatcctaagatgatgttc

SEQ ID NO: 4373 - DNA, 20 bp, Artificial Sequence
  Synthetic
gtggtttatattctggccta

SEQ ID NO: 4374 - DNA, 20 bp, Artificial Sequence
  Synthetic
gaacatcatcttaggataac

SEQ ID NO: 4375 - DNA, 20 bp, Artificial Sequence
  Synthetic
gaagctttgtcctatggatt

SEQ ID NO: 4376 - DNA, 20 bp, Artificial Sequence
  Synthetic
gacactcaaaggacagtgtc

SEQ ID NO: 4377 - DNA, 20 bp, Artificial Sequence
  Synthetic
gctggcacacttgaaagcaa

SEQ ID NO: 4378 - DNA, 20 bp, Artificial Sequence
  Synthetic
ggaaacaaatagagttgaag

SEQ ID NO: 4379 - DNA, 20 bp, Artificial Sequence
  Synthetic
gcgtgctggaggaagtgctt

SEQ ID NO: 4380 - DNA, 20 bp, Artificial Sequence
  Synthetic
gcatatgtgtgtaaagagtc

SEQ ID NO: 4381 - DNA, 20 bp, Artificial Sequence
  Synthetic
gttaagggagaggcaaagag

SEQ ID NO: 4382 - DNA, 20 bp, Artificial Sequence
  Synthetic
gaggtcttgttcgccttcct

SEQ ID NO: 4383 - DNA, 20 bp, Artificial Sequence
  Synthetic
ggctgaaatttgtgtttgct

SEQ ID NO: 4384 - DNA, 20 bp, Artificial Sequence
  Synthetic
gaggctctaggttaagggag

SEQ ID NO: 4385 - DNA, 20 bp, Artificial Sequence
  Synthetic
gctggataacagaagtttag

SEQ ID NO: 4386 - DNA, 20 bp, Artificial Sequence
  Synthetic
gctcctcacctggaggctct

SEQ ID NO: 4387 - DNA, 20 bp, Artificial Sequence
  Synthetic
gctatctctgtaggcggttc

SEQ ID NO: 4388 - DNA, 20 bp, Artificial Sequence
  Synthetic
gcattgatctgacaaatgag

SEQ ID NO: 4389 - DNA, 20 bp, Artificial Sequence
  Synthetic
gattccagaatgactggagt

SEQ ID NO: 4390 - DNA, 20 bp, Artificial Sequence
  Synthetic
gcaaagcaccgcaatgtgag

SEQ ID NO: 4391 - DNA, 20 bp, Artificial Sequence
  Synthetic
gattacaggacaagtgtctc

SEQ ID NO: 4392 - DNA, 20 bp, Artificial Sequence
  Synthetic
gaatttcaggcagtaggcat

SEQ ID NO: 4393 - DNA, 20 bp, Artificial Sequence
  Synthetic
gttacaggctgttaaagaca

SEQ ID NO: 4394 - DNA, 20 bp, Artificial Sequence
  Synthetic
gtaagagaataacttcagga

SEQ ID NO: 4395 - DNA, 20 bp, Artificial Sequence
  Synthetic
gatctgacaaatgagaggga

SEQ ID NO: 4396 - DNA, 20 bp, Artificial Sequence
  Synthetic
ggtccttagaatatgagagc

SEQ ID NO: 4397 - DNA, 20 bp, Artificial Sequence
  Synthetic
gcaaccaagccagccttaag

SEQ ID NO: 4398 - DNA, 20 bp, Artificial Sequence
  Synthetic
gaatcccaaggtacagtcaa

SEQ ID NO: 4399 - DNA, 20 bp, Artificial Sequence
  Synthetic
gaactctggtgttcaagttc

SEQ ID NO: 4400 - DNA, 20 bp, Artificial Sequence
  Synthetic
gagcatcactagcacttctg

SEQ ID NO: 4401 - DNA, 20 bp, Artificial Sequence
  Synthetic
gtgtcattctagtcagaaat

SEQ ID NO: 4402 - DNA, 20 bp, Artificial Sequence
  Synthetic
gtgctaatttaaggaattct

SEQ ID NO: 4403 - DNA, 20 bp, Artificial Sequence
  Synthetic
gcaacatatccaaccaatac

SEQ ID NO: 4404 - DNA, 20 bp, Artificial Sequence
  Synthetic
gagttgctgttacagagggt

SEQ ID NO: 4405 - DNA, 20 bp, Artificial Sequence
  Synthetic
ggagttgctgttacagaggg

SEQ ID NO: 4406 - DNA, 20 bp, Artificial Sequence
  Synthetic
gaaggcttggcttagggctc

SEQ ID NO: 4407 - DNA, 20 bp, Artificial Sequence
  Synthetic
ggaagcctctagagtatgct

SEQ ID NO: 4408 - DNA, 20 bp, Artificial Sequence
  Synthetic
gccaactggccgagagagtg

SEQ ID NO: 4409 - DNA, 20 bp, Artificial Sequence
  Synthetic
gatcaaggcttagacagagt

SEQ ID NO: 4410 - DNA, 20 bp, Artificial Sequence
  Synthetic
ggcagctctgctgcttctct

SEQ ID NO: 4411 - DNA, 20 bp, Artificial Sequence
  Synthetic
gggagccttcagcagccttc

SEQ ID NO: 4412 - DNA, 20 bp, Artificial Sequence
  Synthetic
gatggcttggcaggaaggct

SEQ ID NO: 4413 - DNA, 20 bp, Artificial Sequence
  Synthetic
gggtccaggaagtaccagac

SEQ ID NO: 4414 - DNA, 20 bp, Artificial Sequence
  Synthetic
gggatagatgccatgtgggt

SEQ ID NO: 4415 - DNA, 20 bp, Artificial Sequence
  Synthetic
gagaagcagcagagctgcca

SEQ ID NO: 4416 - DNA, 20 bp, Artificial Sequence
  Synthetic
gagagcaaactgcaatcttg

SEQ ID NO: 4417 - DNA, 20 bp, Artificial Sequence
  Synthetic
gatagtctcccgttagtttc

SEQ ID NO: 4418 - DNA, 20 bp, Artificial Sequence
  Synthetic
gagggtttagtctagacact

SEQ ID NO: 4419 - DNA, 20 bp, Artificial Sequence
  Synthetic
ggaataaacttaactgccgg

SEQ ID NO: 4420 - DNA, 20 bp, Artificial Sequence
  Synthetic
ggctgacagcaaagagcgga

SEQ ID NO: 4421 - DNA, 20 bp, Artificial Sequence
  Synthetic
gggaaagacagagagaggga

SEQ ID NO: 4422 - DNA, 20 bp, Artificial Sequence
  Synthetic
gtcaaatgcacccgattaga

SEQ ID NO: 4423 - DNA, 20 bp, Artificial Sequence
  Synthetic
ggagcaggacaacttggagg

SEQ ID NO: 4424 - DNA, 20 bp, Artificial Sequence
  Synthetic
gcggcagcaagagaaggagg

SEQ ID NO: 4425 - DNA, 20 bp, Artificial Sequence
  Synthetic
gaaccgagagaatcggatcc

SEQ ID NO: 4426 - DNA, 20 bp, Artificial Sequence
  Synthetic
gggctgggtttgctgcctct

SEQ ID NO: 4427 - DNA, 20 bp, Artificial Sequence
  Synthetic
gcgtgggttcttctgggacc

SEQ ID NO: 4428 - DNA, 20 bp, Artificial Sequence
  Synthetic
ggcgcctaggagggagaaga

SEQ ID NO: 4429 - DNA, 20 bp, Artificial Sequence
  Synthetic
ggtgtctggcctgaggtcaa

SEQ ID NO: 4430 - DNA, 20 bp, Artificial Sequence
  Synthetic
gaacccacgcccgaaatccg

SEQ ID NO: 4431 - DNA, 20 bp, Artificial Sequence
  Synthetic
ggaaactcaaaggtgaatga

SEQ ID NO: 4432 - DNA, 20 bp, Artificial Sequence
  Synthetic
gtatggaagcatggacattc

SEQ ID NO: 4433 - DNA, 20 bp, Artificial Sequence
  Synthetic
gaggaccgggtgtggatttg

SEQ ID NO: 4434 - DNA, 20 bp, Artificial Sequence
  Synthetic
gcaggtacaaataagttgtt

SEQ ID NO: 4435 - DNA, 20 bp, Artificial Sequence
  Synthetic
ggcttcctacaatagcgtgg

SEQ ID NO: 4436 - DNA, 20 bp, Artificial Sequence
  Synthetic
ggcacatttgcagcagacta

SEQ ID NO: 4437 - DNA, 20 bp, Artificial Sequence
  Synthetic
ggcctccttctccttcttta

SEQ ID NO: 4438 - DNA, 20 bp, Artificial Sequence
  Synthetic
gggtgacatcatcccatata

SEQ ID NO: 4439 - DNA, 20 bp, Artificial Sequence
  Synthetic
gattctagcggtctctccag

SEQ ID NO: 4440 - DNA, 20 bp, Artificial Sequence
  Synthetic
gggctggagagtccatatat

SEQ ID NO: 4441 - DNA, 20 bp, Artificial Sequence
  Synthetic
ggactaggcatagaaaggga

SEQ ID NO: 4442 - DNA, 20 bp, Artificial Sequence
  Synthetic
ggactatttgagagtggtta

SEQ ID NO: 4443 - DNA, 20 bp, Artificial Sequence
  Synthetic
gggaatgatgaccaagagga

SEQ ID NO: 4444 - DNA, 20 bp, Artificial Sequence
  Synthetic
gctcccattgcgtccgcact

SEQ ID NO: 4445 - DNA, 20 bp, Artificial Sequence
  Synthetic
gtgtctccagctctttctgt

SEQ ID NO: 4446 - DNA, 20 bp, Artificial Sequence
  Synthetic
gtaaagactggaagcagaca

SEQ ID NO: 4447 - DNA, 20 bp, Artificial Sequence
  Synthetic
gtaagtttagccacaatctc

SEQ ID NO: 4448 - DNA, 20 bp, Artificial Sequence
  Synthetic
ggcactgagaccttctctcg

SEQ ID NO: 4449 - DNA, 20 bp, Artificial Sequence
  Synthetic
ggactgatggatcaggaact

SEQ ID NO: 4450 - DNA, 20 bp, Artificial Sequence
  Synthetic
ggatgtgacttccctctgtt

SEQ ID NO: 4451 - DNA, 20 bp, Artificial Sequence
  Synthetic
gtcgtaaggaaccgctccca

SEQ ID NO: 4452 - DNA, 20 bp, Artificial Sequence
  Synthetic
gacacccactgcaggagagg

SEQ ID NO: 4453 - DNA, 20 bp, Artificial Sequence
  Synthetic
gagttctcagggagcctaag

SEQ ID NO: 4454 - DNA, 20 bp, Artificial Sequence
  Synthetic
gaggaaggacttagcaccca

SEQ ID NO: 4455 - DNA, 20 bp, Artificial Sequence
  Synthetic
gacggacttgggatgaggag

SEQ ID NO: 4456 - DNA, 20 bp, Artificial Sequence
  Synthetic
gcatctactaggcttagttt

SEQ ID NO: 4457 - DNA, 20 bp, Artificial Sequence
  Synthetic
gatcaaggcactctggaaag

SEQ ID NO: 4458 - DNA, 20 bp, Artificial Sequence
  Synthetic
gtcccaagtatccttgggac

SEQ ID NO: 4459 - DNA, 20 bp, Artificial Sequence
  Synthetic
ggtctgctttgtccaaagca

SEQ ID NO: 4460 - DNA, 20 bp, Artificial Sequence
  Synthetic
gcggctccattgctgcatgc

SEQ ID NO: 4461 - DNA, 20 bp, Artificial Sequence
  Synthetic
gcggcctccatatccaactt

SEQ ID NO: 4462 - DNA, 20 bp, Artificial Sequence
  Synthetic
ggatactgggatgagggacc

SEQ ID NO: 4463 - DNA, 20 bp, Artificial Sequence
  Synthetic
gatccgaggaaatcagtaca

SEQ ID NO: 4464 - DNA, 20 bp, Artificial Sequence
  Synthetic
gttggaactgcgtgtcttca

SEQ ID NO: 4465 - DNA, 20 bp, Artificial Sequence
  Synthetic
gtcatcttcaactccctgct

SEQ ID NO: 4466 - DNA, 20 bp, Artificial Sequence
  Synthetic
gcctgcctcccagctctttc

SEQ ID NO: 4467 - DNA, 20 bp, Artificial Sequence
  Synthetic
gcgtcacaatctgtgaggcc

SEQ ID NO: 4468 - DNA, 20 bp, Artificial Sequence
  Synthetic
gtctgactgatcaccctgga

SEQ ID NO: 4469 - DNA, 20 bp, Artificial Sequence
  Synthetic
ggcagctgttgagccattca

SEQ ID NO: 4470 - DNA, 20 bp, Artificial Sequence
  Synthetic
gatctcagactgaagtgtat

SEQ ID NO: 4471 - DNA, 20 bp, Artificial Sequence
  Synthetic
gcctaacaggcagagcttgt

SEQ ID NO: 4472 - DNA, 20 bp, Artificial Sequence
  Synthetic
gactagtatgctagtatgcc

SEQ ID NO: 4473 - DNA, 20 bp, Artificial Sequence
  Synthetic
gaacagccttggatcagtcc

SEQ ID NO: 4474 - DNA, 20 bp, Artificial Sequence
  Synthetic
ggccaaacttcctgcacatt

SEQ ID NO: 4475 - DNA, 20 bp, Artificial Sequence
  Synthetic
gaccaatccaccaaatgtgc

SEQ ID NO: 4476 - DNA, 20 bp, Artificial Sequence
  Synthetic
gcagagacggacctatgccg

SEQ ID NO: 4477 - DNA, 20 bp, Artificial Sequence
  Synthetic
gttagagccctcccagtgta

SEQ ID NO: 4478 - DNA, 20 bp, Artificial Sequence
  Synthetic
gtttcctcggttcaacacta

SEQ ID NO: 4479 - DNA, 20 bp, Artificial Sequence
  Synthetic
gagatctaagcgggactatg

SEQ ID NO: 4480 - DNA, 20 bp, Artificial Sequence
  Synthetic
ggccctgtgaaggtatcaga

SEQ ID NO: 4481 - DNA, 20 bp, Artificial Sequence
  Synthetic
gggacagtcagagagaggga

SEQ ID NO: 4482 - DNA, 20 bp, Artificial Sequence
  Synthetic
gagccctcccagtgtaaggc

SEQ ID NO: 4483 - DNA, 20 bp, Artificial Sequence
  Synthetic
gttctgctttctttcctaca

SEQ ID NO: 4484 - DNA, 20 bp, Artificial Sequence
  Synthetic
gcaggagggatcctcacctg

SEQ ID NO: 4485 - DNA, 20 bp, Artificial Sequence
  Synthetic
gcctgagagagctacctcca

SEQ ID NO: 4486 - DNA, 20 bp, Artificial Sequence
  Synthetic
gactaagagaaggaaggaaa

SEQ ID NO: 4487 - DNA, 20 bp, Artificial Sequence
  Synthetic
ggtcctgtaaacaccaaggc

SEQ ID NO: 4488 - DNA, 20 bp, Artificial Sequence
  Synthetic
gtactaatcacgctcagtgg

SEQ ID NO: 4489 - DNA, 20 bp, Artificial Sequence
  Synthetic
ggatcctttgggtacaacac

SEQ ID NO: 4490 - DNA, 20 bp, Artificial Sequence
  Synthetic
gtgagggccttggtatgagt

SEQ ID NO: 4491 - DNA, 20 bp, Artificial Sequence
  Synthetic
ggacacaacctctgatggga

SEQ ID NO: 4492 - DNA, 20 bp, Artificial Sequence
  Synthetic
gaagccagacgccctaccca

SEQ ID NO: 4493 - DNA, 20 bp, Artificial Sequence
  Synthetic
ggagaagctgaagccagagc

SEQ ID NO: 4494 - DNA, 20 bp, Artificial Sequence
  Synthetic
gctaggtcactgccatggtg

SEQ ID NO: 4495 - DNA, 20 bp, Artificial Sequence
  Synthetic
gacattatcgcttgccatgg

SEQ ID NO: 4496 - DNA, 20 bp, Artificial Sequence
  Synthetic
gggctagagccactttgaat

SEQ ID NO: 4497 - DNA, 20 bp, Artificial Sequence
  Synthetic
gtctgcaggaggcagtgaag

SEQ ID NO: 4498 - DNA, 20 bp, Artificial Sequence
  Synthetic
ggttctctgacctgtagagt

SEQ ID NO: 4499 - DNA, 20 bp, Artificial Sequence
  Synthetic
gacaatggagacagagtaga

SEQ ID NO: 4500 - DNA, 20 bp, Artificial Sequence
  Synthetic
gagggctgccaaacggtctt

SEQ ID NO: 4501 - DNA, 20 bp, Artificial Sequence
  Synthetic
gcaggtgtggtgtgtaggga

SEQ ID NO: 4502 - DNA, 20 bp, Artificial Sequence
  Synthetic
gacagagtcaaagtgagggc

SEQ ID NO: 4503 - DNA, 20 bp, Artificial Sequence
  Synthetic
ggagaacagggtgtgtccca

SEQ ID NO: 4504 - DNA, 20 bp, Artificial Sequence
  Synthetic
ggcctaaggaacacttgtgc

SEQ ID NO: 4505 - DNA, 20 bp, Artificial Sequence
  Synthetic
gatgtctgcatcactgtctc

SEQ ID NO: 4506 - DNA, 20 bp, Artificial Sequence
  Synthetic
ggtctctcaccaatgcctcg

SEQ ID NO: 4507 - DNA, 20 bp, Artificial Sequence
  Synthetic
gattgggcttacttcttgtt

SEQ ID NO: 4508 - DNA, 20 bp, Artificial Sequence
  Synthetic
ggcagtttccctttgaggca

SEQ ID NO: 4509 - DNA, 20 bp, Artificial Sequence
  Synthetic
gtgttggctagagggaagtg

SEQ ID NO: 4510 - DNA, 20 bp, Artificial Sequence
  Synthetic
gatgtgggctaggagggact

SEQ ID NO: 4511 - DNA, 20 bp, Artificial Sequence
  Synthetic
gatcggactgtgggagacaa

SEQ ID NO: 4512 - DNA, 20 bp, Artificial Sequence
  Synthetic
gctggctaagaactgctcag

SEQ ID NO: 4513 - DNA, 20 bp, Artificial Sequence
  Synthetic
gggtatctgtgactccaggg

SEQ ID NO: 4514 - DNA, 20 bp, Artificial Sequence
  Synthetic
gccattgggaggtgagcagc

SEQ ID NO: 4515 - DNA, 20 bp, Artificial Sequence
  Synthetic
ggatgcacaagaagctatgt

SEQ ID NO: 4516 - DNA, 20 bp, Artificial Sequence
  Synthetic
gttcttagtttggccagtgg

SEQ ID NO: 4517 - DNA, 20 bp, Artificial Sequence
  Synthetic
gggcaaatattgactcatgg

SEQ ID NO: 4518 - DNA, 20 bp, Artificial Sequence
  Synthetic
gctgacaccagcaaacagtc

SEQ ID NO: 4519 - DNA, 20 bp, Artificial Sequence
  Synthetic
gatgttctgccttcgctagg

SEQ ID NO: 4520 - DNA, 20 bp, Artificial Sequence
  Synthetic
gagtgctctgagtcctggct

SEQ ID NO: 4521 - DNA, 20 bp, Artificial Sequence
  Synthetic
gtcagcatgcacaggtcagg

SEQ ID NO: 4522 - DNA, 20 bp, Artificial Sequence
  Synthetic
ggtggtagggcaatgatgcg

SEQ ID NO: 4523 - DNA, 20 bp, Artificial Sequence
  Synthetic
gtgggaagattctatctcca

SEQ ID NO: 4524 - DNA, 20 bp, Artificial Sequence
  Synthetic
gaaggccaactggactgttt

SEQ ID NO: 4525 - DNA, 20 bp, Artificial Sequence
  Synthetic
ggactctgagtccttgaact

SEQ ID NO: 4526 - DNA, 20 bp, Artificial Sequence
  Synthetic
ggagggtaagtcagtgagtg

SEQ ID NO: 4527 - DNA, 20 bp, Artificial Sequence
  Synthetic
gtgagagagactgtgttaga

SEQ ID NO: 4528 - DNA, 20 bp, Artificial Sequence
  Synthetic
gcacttgagggtgttgaacc

SEQ ID NO: 4529 - DNA, 20 bp, Artificial Sequence
  Synthetic
ggtgttgaacctggcggagg

SEQ ID NO: 4530 - DNA, 20 bp, Artificial Sequence
  Synthetic
ggttcattctatacacccta

SEQ ID NO: 4531 - DNA, 20 bp, Artificial Sequence
  Synthetic
gagggactcggagcagagtt

SEQ ID NO: 4532 - DNA, 20 bp, Artificial Sequence
  Synthetic
ggagggaaaccaaggtaggt

SEQ ID NO: 4533 - DNA, 20 bp, Artificial Sequence
  Synthetic
ggcctctgattaaatcacca

SEQ ID NO: 4534 - DNA, 20 bp, Artificial Sequence
  Synthetic
gtaatgtgtctcttgtgtta

SEQ ID NO: 4535 - DNA, 20 bp, Artificial Sequence
  Synthetic
gagcgggtcctgtgtgtcac

SEQ ID NO: 4536 - DNA, 20 bp, Artificial Sequence
  Synthetic
gtggtgctgcgcggacactt

SEQ ID NO: 4537 - DNA, 20 bp, Artificial Sequence
  Synthetic
gctctcctagctggtggagg

SEQ ID NO: 4538 - DNA, 20 bp, Artificial Sequence
  Synthetic
gcactgttagcactttgaca

SEQ ID NO: 4539 - DNA, 20 bp, Artificial Sequence
  Synthetic
gatggaatgtttgtgttgat

SEQ ID NO: 4540 - DNA, 20 bp, Artificial Sequence
  Synthetic
gagctttctctggagggctg

SEQ ID NO: 4541 - DNA, 20 bp, Artificial Sequence
  Synthetic
gttgtgtagaagaacaagct

SEQ ID NO: 4542 - DNA, 20 bp, Artificial Sequence
  Synthetic
ggaacataccatggtacggc

SEQ ID NO: 4543 - DNA, 20 bp, Artificial Sequence
  Synthetic
gacccatacaactctgcaag

SEQ ID NO: 4544 - DNA, 20 bp, Artificial Sequence
  Synthetic
gaagactgtgcaagagacta

SEQ ID NO: 4545 - DNA, 20 bp, Artificial Sequence
  Synthetic
gaggccaggttgaaagattg

SEQ ID NO: 4546 - DNA, 20 bp, Artificial Sequence
  Synthetic
ggtttgagattgctccgtgg

SEQ ID NO: 4547 - DNA, 20 bp, Artificial Sequence
  Synthetic
gttgtattgtagataactgc

SEQ ID NO: 4548 - DNA, 20 bp, Artificial Sequence
  Synthetic
gtttgagattgctccgtggt

SEQ ID NO: 4549 - DNA, 20 bp, Artificial Sequence
  Synthetic
ggtcaaagattcaaagaagc

SEQ ID NO: 4550 - DNA, 20 bp, Artificial Sequence
  Synthetic
ggaatagctagagaccacat

SEQ ID NO: 4551 - DNA, 20 bp, Artificial Sequence
  Synthetic
gtctgaggcctgaaagaagc

SEQ ID NO: 4552 - DNA, 20 bp, Artificial Sequence
  Synthetic
gcccaggtgagaaggctgag

SEQ ID NO: 4553 - DNA, 20 bp, Artificial Sequence
  Synthetic
ggtaaagacatctaagctga

SEQ ID NO: 4554 - DNA, 20 bp, Artificial Sequence
  Synthetic
gctagtcgttagggacagac

SEQ ID NO: 4555 - DNA, 20 bp, Artificial Sequence
  Synthetic
gctgcctggcttcctaggtc

SEQ ID NO: 4556 - DNA, 20 bp, Artificial Sequence
  Synthetic
ggcccaggtgagaaggctga

SEQ ID NO: 4557 - DNA, 20 bp, Artificial Sequence
  Synthetic
gcctagagaaaggccagatg

SEQ ID NO: 4558 - DNA, 20 bp, Artificial Sequence
  Synthetic
gcagcaaggcagaagaggcg

SEQ ID NO: 4559 - DNA, 20 bp, Artificial Sequence
  Synthetic
gaggcgtgacagtagacgct

SEQ ID NO: 4560 - DNA, 20 bp, Artificial Sequence
  Synthetic
ggtgttgcactgccttatct

SEQ ID NO: 4561 - DNA, 20 bp, Artificial Sequence
  Synthetic
ggcgctgtaaagatggcggc

SEQ ID NO: 4562 - DNA, 20 bp, Artificial Sequence
  Synthetic
gcaaggatgcagagaggaga

SEQ ID NO: 4563 - DNA, 20 bp, Artificial Sequence
  Synthetic
gtatgtatgaaacgtgtagg

SEQ ID NO: 4564 - DNA, 20 bp, Artificial Sequence
  Synthetic
ggactgggtgggtgtgaggt

SEQ ID NO: 4565 - DNA, 20 bp, Artificial Sequence
  Synthetic
ggcagtgcaacaccggaacc

SEQ ID NO: 4566 - DNA, 20 bp, Artificial Sequence
  Synthetic
gagagtagggaaaccagccg

SEQ ID NO: 4567 - DNA, 20 bp, Artificial Sequence
  Synthetic
gggcgctgtaaagatggcgg

SEQ ID NO: 4568 - DNA, 20 bp, Artificial Sequence
  Synthetic
gaagtcagcaaatggtggtg

SEQ ID NO: 4569 - DNA, 20 bp, Artificial Sequence
  Synthetic
gacactcctgaaagttgggc

SEQ ID NO: 4570 - DNA, 20 bp, Artificial Sequence
  Synthetic
gacacactggaagtggaatc

SEQ ID NO: 4571 - DNA, 20 bp, Artificial Sequence
  Synthetic
gccataagcagtcagaatat

SEQ ID NO: 4572 - DNA, 20 bp, Artificial Sequence
  Synthetic
gtgggatggacagatggaaa

SEQ ID NO: 4573 - DNA, 20 bp, Artificial Sequence
  Synthetic
gggctgtgttgggaagaaga

SEQ ID NO: 4574 - DNA, 20 bp, Artificial Sequence
  Synthetic
gaattgttacagggagaacc

SEQ ID NO: 4575 - DNA, 20 bp, Artificial Sequence
  Synthetic
gtctggtctggacacctctt

SEQ ID NO: 4576 - DNA, 20 bp, Artificial Sequence
  Synthetic
gtaagctgtctgttgagact

SEQ ID NO: 4577 - DNA, 20 bp, Artificial Sequence
  Synthetic
gctgacctcagcctggtaaa

SEQ ID NO: 4578 - DNA, 20 bp, Artificial Sequence
  Synthetic
gcgcctttgatggtgacagg

SEQ ID NO: 4579 - DNA, 20 bp, Artificial Sequence
  Synthetic
gggaggcgcgaacttgagtc

SEQ ID NO: 4580 - DNA, 20 bp, Artificial Sequence
  Synthetic
gaattcttcaacctgctacg

SEQ ID NO: 4581 - DNA, 20 bp, Artificial Sequence
  Synthetic
gtaaggtctagcacatagca

SEQ ID NO: 4582 - DNA, 20 bp, Artificial Sequence
  Synthetic
gcttgacctgtccaccagct

SEQ ID NO: 4583 - DNA, 20 bp, Artificial Sequence
  Synthetic
gctaggctgtttaaccaacc

SEQ ID NO: 4584 - DNA, 20 bp, Artificial Sequence
  Synthetic
gaagaagaaagaaagggaga

SEQ ID NO: 4585 - DNA, 20 bp, Artificial Sequence
  Synthetic
gggcagacagaaggtggcag

SEQ ID NO: 4586 - DNA, 20 bp, Artificial Sequence
  Synthetic
ggattggtggttggactggc

SEQ ID NO: 4587 - DNA, 20 bp, Artificial Sequence
  Synthetic
gaaccacgagtgtacgctat

SEQ ID NO: 4588 - DNA, 20 bp, Artificial Sequence
  Synthetic
gggaaggatgagactgccct

SEQ ID NO: 4589 - DNA, 20 bp, Artificial Sequence
  Synthetic
ggcaaatagcagttggattc

SEQ ID NO: 4590 - DNA, 20 bp, Artificial Sequence
  Synthetic
gacctcctcccacctcttgg

SEQ ID NO: 4591 - DNA, 20 bp, Artificial Sequence
  Synthetic
gttagggctagcccgattta

SEQ ID NO: 4592 - DNA, 20 bp, Artificial Sequence
  Synthetic
gctcttaaacaccgtgttct

SEQ ID NO: 4593 - DNA, 20 bp, Artificial Sequence
  Synthetic
ggcagagagagaggcgtcat

SEQ ID NO: 4594 - DNA, 20 bp, Artificial Sequence
  Synthetic
gtgcttcaccagaaagagtc

SEQ ID NO: 4595 - DNA, 20 bp, Artificial Sequence
  Synthetic
ggcatttattgtgtcctttc

SEQ ID NO: 4596 - DNA, 20 bp, Artificial Sequence
  Synthetic
gaagtctggaactggcggag

SEQ ID NO: 4597 - DNA, 20 bp, Artificial Sequence
  Synthetic
gcggcttaactgtcccactt

SEQ ID NO: 4598 - DNA, 20 bp, Artificial Sequence
  Synthetic
gcaatgaggacacagctaat

SEQ ID NO: 4599 - DNA, 20 bp, Artificial Sequence
  Synthetic
gatgacacacgggtcaggaa

SEQ ID NO: 4600 - DNA, 20 bp, Artificial Sequence
  Synthetic
gttcaggaacttgtctgtgg

SEQ ID NO: 4601 - DNA, 20 bp, Artificial Sequence
  Synthetic
gcatctgactgagttcctgg

SEQ ID NO: 4602 - DNA, 20 bp, Artificial Sequence
  Synthetic
ggcccatagggatccagcag

SEQ ID NO: 4603 - DNA, 20 bp, Artificial Sequence
  Synthetic
gactgagcctcgcctcttcc

SEQ ID NO: 4604 - DNA, 20 bp, Artificial Sequence
  Synthetic
gaacaggtactagccagaga

SEQ ID NO: 4605 - DNA, 20 bp, Artificial Sequence
  Synthetic
ggtccagatacctcagtctc

SEQ ID NO: 4606 - DNA, 20 bp, Artificial Sequence
  Synthetic
gaggctgaagcaggtttccc

SEQ ID NO: 4607 - DNA, 20 bp, Artificial Sequence
  Synthetic
ggactcagttccgggtatgg

SEQ ID NO: 4608 - DNA, 20 bp, Artificial Sequence
  Synthetic
gcactccacgtggtgggtag

SEQ ID NO: 4609 - DNA, 20 bp, Artificial Sequence
  Synthetic
gctgaagttgttgggtctgg

SEQ ID NO: 4610 - DNA, 20 bp, Artificial Sequence
  Synthetic
gtttaagagcggtgatgccc

SEQ ID NO: 4611 - DNA, 20 bp, Artificial Sequence
  Synthetic
gtggctgaagttgttgggtc

SEQ ID NO: 4612 - DNA, 20 bp, Artificial Sequence
  Synthetic
ggcactccacgtggtgggta

SEQ ID NO: 4613 - DNA, 20 bp, Artificial Sequence
  Synthetic
ggagcttgggaatagccctg

SEQ ID NO: 4614 - DNA, 20 bp, Artificial Sequence
  Synthetic
ggagaaagctggcctaatgt

SEQ ID NO: 4615 - DNA, 20 bp, Artificial Sequence
  Synthetic
gaattgcagtaaagacaact

SEQ ID NO: 4616 - DNA, 20 bp, Artificial Sequence
  Synthetic
gcccagaagccaaattccaa

SEQ ID NO: 4617 - DNA, 20 bp, Artificial Sequence
  Synthetic
gttagactgtagagaggcac

SEQ ID NO: 4618 - DNA, 20 bp, Artificial Sequence
  Synthetic
ggctgtgaactctgggcatc

SEQ ID NO: 4619 - DNA, 20 bp, Artificial Sequence
  Synthetic
ggacaatcataagagcgcct

SEQ ID NO: 4620 - DNA, 20 bp, Artificial Sequence
  Synthetic
ggcctctctttcccactaga

SEQ ID NO: 4621 - DNA, 20 bp, Artificial Sequence
  Synthetic
ggagagcaaccgatggttgg

SEQ ID NO: 4622 - DNA, 20 bp, Artificial Sequence
  Synthetic
ggcatcgggtactagagggc

SEQ ID NO: 4623 - DNA, 20 bp, Artificial Sequence
  Synthetic
gctaacctttccactgggac

SEQ ID NO: 4624 - DNA, 20 bp, Artificial Sequence
  Synthetic
gaactttgctgtagaggcat

SEQ ID NO: 4625 - DNA, 20 bp, Artificial Sequence
  Synthetic
gacatagctaacctttccac

SEQ ID NO: 4626 - DNA, 20 bp, Artificial Sequence
  Synthetic
ggaaatggagacatgccagt

SEQ ID NO: 4627 - DNA, 20 bp, Artificial Sequence
  Synthetic
gaggaatagcacaagacaga

SEQ ID NO: 4628 - DNA, 20 bp, Artificial Sequence
  Synthetic
gcctggtgatgtagcctaat

SEQ ID NO: 4629 - DNA, 20 bp, Artificial Sequence
  Synthetic
gggaattgcgacagaccgga

SEQ ID NO: 4630 - DNA, 20 bp, Artificial Sequence
  Synthetic
gtctgggtcaggagggcaac

SEQ ID NO: 4631 - DNA, 20 bp, Artificial Sequence
  Synthetic
gtatgtttataggtaagacc

SEQ ID NO: 4632 - DNA, 20 bp, Artificial Sequence
  Synthetic
gcactggagctgtaagtgtg

SEQ ID NO: 4633 - DNA, 20 bp, Artificial Sequence
  Synthetic
gaagagggaaatgaatggga

SEQ ID NO: 4634 - DNA, 20 bp, Artificial Sequence
  Synthetic
gggagggtaatgtaaagcag

SEQ ID NO: 4635 - DNA, 20 bp, Artificial Sequence
  Synthetic
ggaagggtgagacacctaca

SEQ ID NO: 4636 - DNA, 20 bp, Artificial Sequence
  Synthetic
ggctttgttaacaaacagac

SEQ ID NO: 4637 - DNA, 20 bp, Artificial Sequence
  Synthetic
gagtaatgaacttgaatgac

SEQ ID NO: 4638 - DNA, 20 bp, Artificial Sequence
  Synthetic
gattgcttaaacttgactgt

SEQ ID NO: 4639 - DNA, 20 bp, Artificial Sequence
  Synthetic
ggtgcaggcagaaagatgga

SEQ ID NO: 4640 - DNA, 20 bp, Artificial Sequence
  Synthetic
gtagtgagcagctgcagctt

SEQ ID NO: 4641 - DNA, 20 bp, Artificial Sequence
  Synthetic
gaagtatcatagcaggtggc

SEQ ID NO: 4642 - DNA, 20 bp, Artificial Sequence
  Synthetic
gatgtgtgtttgcttatcca

SEQ ID NO: 4643 - DNA, 20 bp, Artificial Sequence
  Synthetic
ggcagaaagatggaaggcag

SEQ ID NO: 4644 - DNA, 20 bp, Artificial Sequence
  Synthetic
gggctgcttggtagtccttt

SEQ ID NO: 4645 - DNA, 20 bp, Artificial Sequence
  Synthetic
gttatttgtcagagtagcaa

SEQ ID NO: 4646 - DNA, 20 bp, Artificial Sequence
  Synthetic
gccgatttacactctgcgct

SEQ ID NO: 4647 - DNA, 20 bp, Artificial Sequence
  Synthetic
gggtaattatccgagcacgg

SEQ ID NO: 4648 - DNA, 20 bp, Artificial Sequence
  Synthetic
ggaggtatatctttggtgca

SEQ ID NO: 4649 - DNA, 20 bp, Artificial Sequence
  Synthetic
gcaactgtgtagacaacttc

SEQ ID NO: 4650 - DNA, 20 bp, Artificial Sequence
  Synthetic
gatgcccacctgacttagct

SEQ ID NO: 4651 - DNA, 20 bp, Artificial Sequence
  Synthetic
gagcctcacatctgcccaca

SEQ ID NO: 4652 - DNA, 20 bp, Artificial Sequence
  Synthetic
gggctgccgtggccatttag

SEQ ID NO: 4653 - DNA, 20 bp, Artificial Sequence
  Synthetic
gaggtgattggcggctcacc

SEQ ID NO: 4654 - DNA, 20 bp, Artificial Sequence
  Synthetic
gagcaaagaggcctagcctc

SEQ ID NO: 4655 - DNA, 20 bp, Artificial Sequence
  Synthetic
gagaaggctgtagacgggcc

SEQ ID NO: 4656 - DNA, 20 bp, Artificial Sequence
  Synthetic
gccagagcttggtactctgg

SEQ ID NO: 4657 - DNA, 20 bp, Artificial Sequence
  Synthetic
gcaccagaaacactttaaag

SEQ ID NO: 4658 - DNA, 20 bp, Artificial Sequence
  Synthetic
gaatgttggaaatctgcgga

SEQ ID NO: 4659 - DNA, 20 bp, Artificial Sequence
  Synthetic
gcctagagaggagactcaag

SEQ ID NO: 4660 - DNA, 20 bp, Artificial Sequence
  Synthetic
gactgtatctctgcctaacc

SEQ ID NO: 4661 - DNA, 20 bp, Artificial Sequence
  Synthetic
ggtgctggagggagtattta

SEQ ID NO: 4662 - DNA, 20 bp, Artificial Sequence
  Synthetic
gacactgaaagggaaacggt

SEQ ID NO: 4663 - DNA, 20 bp, Artificial Sequence
  Synthetic
gttggagaggcgcctggcaa

SEQ ID NO: 4664 - DNA, 20 bp, Artificial Sequence
  Synthetic
gaggcgcctggcaaagggat

SEQ ID NO: 4665 - DNA, 20 bp, Artificial Sequence
  Synthetic
gatgagtgtttaccaaggag

SEQ ID NO: 4666 - DNA, 20 bp, Artificial Sequence
  Synthetic
gggctagaaagacgcgtcct

SEQ ID NO: 4667 - DNA, 20 bp, Artificial Sequence
  Synthetic
gtcgacagcaatgactcatt

SEQ ID NO: 4668 - DNA, 20 bp, Artificial Sequence
  Synthetic
gatgcagtctttccttgacc

SEQ ID NO: 4669 - DNA, 20 bp, Artificial Sequence
  Synthetic
gtcatcagtttgtggacaat

SEQ ID NO: 4670 - DNA, 20 bp, Artificial Sequence
  Synthetic
gtccattcctccactccaga

SEQ ID NO: 4671 - DNA, 20 bp, Artificial Sequence
  Synthetic
gcctcagccttctggagtgg

SEQ ID NO: 4672 - DNA, 20 bp, Artificial Sequence
  Synthetic
gatctcttgaggtcgagttg

SEQ ID NO: 4673 - DNA, 20 bp, Artificial Sequence
  Synthetic
gggctacagggtaggagtgg

SEQ ID NO: 4674 - DNA, 20 bp, Artificial Sequence
  Synthetic
gggctgagtcttcaatggtg

SEQ ID NO: 4675 - DNA, 20 bp, Artificial Sequence
  Synthetic
gctcaggtagaagaaacagg

SEQ ID NO: 4676 - DNA, 20 bp, Artificial Sequence
  Synthetic
gccacaaaggactagctgcc

SEQ ID NO: 4677 - DNA, 20 bp, Artificial Sequence
  Synthetic
gaactggtgaataaactctt

SEQ ID NO: 4678 - DNA, 20 bp, Artificial Sequence
  Synthetic
gccttggagttgagcagaaa

SEQ ID NO: 4679 - DNA, 20 bp, Artificial Sequence
  Synthetic
gatgctcagtacgggatatg

SEQ ID NO: 4680 - DNA, 20 bp, Artificial Sequence
  Synthetic
gcttggacagtggaagcatc

SEQ ID NO: 4681 - DNA, 20 bp, Artificial Sequence
  Synthetic
gttcttgagctgaaacaggt

SEQ ID NO: 4682 - DNA, 20 bp, Artificial Sequence
  Synthetic
gcaagggagaagagaaggga

SEQ ID NO: 4683 - DNA, 20 bp, Artificial Sequence
  Synthetic
ggttccaaccttccttaagg

SEQ ID NO: 4684 - DNA, 20 bp, Artificial Sequence
  Synthetic
ggactaactgaagtccctga

SEQ ID NO: 4685 - DNA, 20 bp, Artificial Sequence
  Synthetic
ggcaatgacctccacccagc

SEQ ID NO: 4686 - DNA, 20 bp, Artificial Sequence
  Synthetic
gttataggagaggactgagc

SEQ ID NO: 4687 - DNA, 20 bp, Artificial Sequence
  Synthetic
gtgacgtcatcgtagccggg

SEQ ID NO: 4688 - DNA, 20 bp, Artificial Sequence
  Synthetic
gacagtgggcaacaggtcgg

SEQ ID NO: 4689 - DNA, 20 bp, Artificial Sequence
  Synthetic
gggatggaagggatggcctc

SEQ ID NO: 4690 - DNA, 20 bp, Artificial Sequence
  Synthetic
gcggtttgaatttagttctg

SEQ ID NO: 4691 - DNA, 20 bp, Artificial Sequence
  Synthetic
gaggtgacgtcatcgtagcc

SEQ ID NO: 4692 - DNA, 20 bp, Artificial Sequence
  Synthetic
gagtatctagcgccatctac

SEQ ID NO: 4693 - DNA, 20 bp, Artificial Sequence
  Synthetic
ggtagccatacctatgagtc

SEQ ID NO: 4694 - DNA, 20 bp, Artificial Sequence
  Synthetic
gagcaatctgtagcaggaga

SEQ ID NO: 4695 - DNA, 20 bp, Artificial Sequence
  Synthetic
ggctgttacctatacctcct

SEQ ID NO: 4696 - DNA, 20 bp, Artificial Sequence
  Synthetic
gctcctccttctcttccaag

SEQ ID NO: 4697 - DNA, 20 bp, Artificial Sequence
  Synthetic
gcatcagttctactgcagca

SEQ ID NO: 4698 - DNA, 20 bp, Artificial Sequence
  Synthetic
gtaacagtttgtagactgaa

SEQ ID NO: 4699 - DNA, 20 bp, Artificial Sequence
  Synthetic
gaaggacgggagagctagga

SEQ ID NO: 4700 - DNA, 20 bp, Artificial Sequence
  Synthetic
gtcctgtgtgcctctgctac

SEQ ID NO: 4701 - DNA, 20 bp, Artificial Sequence
  Synthetic
ggccctatctacatattcat

SEQ ID NO: 4702 - DNA, 20 bp, Artificial Sequence
  Synthetic
gcgttcggccagtccctatt

SEQ ID NO: 4703 - DNA, 20 bp, Artificial Sequence
  Synthetic
gcagaatgagctggcttccc

SEQ ID NO: 4704 - DNA, 20 bp, Artificial Sequence
  Synthetic
gacagcaagcctgctgctca

SEQ ID NO: 4705 - DNA, 20 bp, Artificial Sequence
  Synthetic
gattgtgggcttggtcagag

SEQ ID NO: 4706 - DNA, 20 bp, Artificial Sequence
  Synthetic
gtaggcattgcacgccgatt

SEQ ID NO: 4707 - DNA, 20 bp, Artificial Sequence
  Synthetic
gtgccatcttccctcacaaa

SEQ ID NO: 4708 - DNA, 20 bp, Artificial Sequence
  Synthetic
gatccgtgagtgtctgtttg

SEQ ID NO: 4709 - DNA, 20 bp, Artificial Sequence
  Synthetic
gacatctgtggctcacaccc

SEQ ID NO: 4710 - DNA, 20 bp, Artificial Sequence
  Synthetic
gtctgggctctgtctataca

SEQ ID NO: 4711 - DNA, 20 bp, Artificial Sequence
  Synthetic
gtttgcggtgcttggtctga

SEQ ID NO: 4712 - DNA, 20 bp, Artificial Sequence
  Synthetic
ggtgtgtccacgcatacatg

SEQ ID NO: 4713 - DNA, 20 bp, Artificial Sequence
  Synthetic
gggcgggactacatttccca

SEQ ID NO: 4714 - DNA, 20 bp, Artificial Sequence
  Synthetic
gctaggatttgcggagaggc

SEQ ID NO: 4715 - DNA, 20 bp, Artificial Sequence
  Synthetic
gtctccaggctaccctgtcc

SEQ ID NO: 4716 - DNA, 20 bp, Artificial Sequence
  Synthetic
ggagggaagaagaggttcct

SEQ ID NO: 4717 - DNA, 20 bp, Artificial Sequence
  Synthetic
ggaaagactacatctcccgg

SEQ ID NO: 4718 - DNA, 20 bp, Artificial Sequence
  Synthetic
gactttatttactgagaggg

SEQ ID NO: 4719 - DNA, 20 bp, Artificial Sequence
  Synthetic
gtctctgggctggtgaggac

SEQ ID NO: 4720 - DNA, 20 bp, Artificial Sequence
  Synthetic
gatcatccgcacccgctcca

SEQ ID NO: 4721 - DNA, 20 bp, Artificial Sequence
  Synthetic
gaatgaacctacaggacgga

SEQ ID NO: 4722 - DNA, 20 bp, Artificial Sequence
  Synthetic
ggattcaagaggctcaggaa

SEQ ID NO: 4723 - DNA, 20 bp, Artificial Sequence
  Synthetic
gtccagcaagtgtttgacgc

SEQ ID NO: 4724 - DNA, 20 bp, Artificial Sequence
  Synthetic
gtgagtgtcccaagtgcttt

SEQ ID NO: 4725 - DNA, 20 bp, Artificial Sequence
  Synthetic
ggaagagaatgcttctgtaa

SEQ ID NO: 4726 - DNA, 20 bp, Artificial Sequence
  Synthetic
ggatgcaatagatgcaactt

SEQ ID NO: 4727 - DNA, 20 bp, Artificial Sequence
  Synthetic
ggcgtgtgtctaagtgaggg

SEQ ID NO: 4728 - DNA, 20 bp, Artificial Sequence
  Synthetic
gtggtaggcacctcctaggg

SEQ ID NO: 4729 - DNA, 20 bp, Artificial Sequence
  Synthetic
gctcccgggtgtgttgaagt

SEQ ID NO: 4730 - DNA, 20 bp, Artificial Sequence
  Synthetic
gttcaagacttgtgctgact

SEQ ID NO: 4731 - DNA, 20 bp, Artificial Sequence
  Synthetic
gccgtttgaatctgcgcacg

SEQ ID NO: 4732 - DNA, 20 bp, Artificial Sequence
  Synthetic
ggccagtttccttgtccttt

SEQ ID NO: 4733 - DNA, 20 bp, Artificial Sequence
  Synthetic
gctgtgagtctcgccactta

SEQ ID NO: 4734 - DNA, 20 bp, Artificial Sequence
  Synthetic
ggtgacaggacacggaacgc

SEQ ID NO: 4735 - DNA, 20 bp, Artificial Sequence
  Synthetic
gagtaactgaaatcttgcat

SEQ ID NO: 4736 - DNA, 20 bp, Artificial Sequence
  Synthetic
gcaacttctcaacagttaca

SEQ ID NO: 4737 - DNA, 20 bp, Artificial Sequence
  Synthetic
gaagaacacttgaagttctc

SEQ ID NO: 4738 - DNA, 20 bp, Artificial Sequence
  Synthetic
gacgaacgaatgagttatct

SEQ ID NO: 4739 - DNA, 20 bp, Artificial Sequence
  Synthetic
gatacccgcggatcccaagt

SEQ ID NO: 4740 - DNA, 20 bp, Artificial Sequence
  Synthetic
gagctcctcgagctgtttga

SEQ ID NO: 4741 - DNA, 20 bp, Artificial Sequence
  Synthetic
gaattgccaacccagatctg

SEQ ID NO: 4742 - DNA, 20 bp, Artificial Sequence
  Synthetic
gatgaccggaagcttgtctt

SEQ ID NO: 4743 - DNA, 20 bp, Artificial Sequence
  Synthetic
gaagtccgaaccggaggtgc

SEQ ID NO: 4744 - DNA, 20 bp, Artificial Sequence
  Synthetic
gcccgaacaaccgtacagaa

SEQ ID NO: 4745 - DNA, 20 bp, Artificial Sequence
  Synthetic
gacgagcgtcactgatagta

SEQ ID NO: 4746 - DNA, 20 bp, Artificial Sequence
  Synthetic
gccttggcttcagaggctga

SEQ ID NO: 4747 - DNA, 20 bp, Artificial Sequence
  Synthetic
gactgttcgagaggctcccg

SEQ ID NO: 4748 - DNA, 20 bp, Artificial Sequence
  Synthetic
gtctaactactcagaactac

SEQ ID NO: 4749 - DNA, 20 bp, Artificial Sequence
  Synthetic
gctaatggttactgaagcaa

SEQ ID NO: 4750 - DNA, 20 bp, Artificial Sequence
  Synthetic
gtgcgtcccacccatgacag

SEQ ID NO: 4751 - DNA, 20 bp, Artificial Sequence
  Synthetic
gaacactatcaagatctcgc

SEQ ID NO: 4752 - DNA, 20 bp, Artificial Sequence
  Synthetic
gggaagtagactagcagggt

SEQ ID NO: 4753 - DNA, 20 bp, Artificial Sequence
  Synthetic
ggacgcacctgaacctggtg

SEQ ID NO: 4754 - DNA, 20 bp, Artificial Sequence
  Synthetic
gaccagttcagccaggaggt

SEQ ID NO: 4755 - DNA, 20 bp, Artificial Sequence
  Synthetic
gaggatgaattctgggaggc

SEQ ID NO: 4756 - DNA, 20 bp, Artificial Sequence
  Synthetic
gacctggtgggtggattcaa

SEQ ID NO: 4757 - DNA, 20 bp, Artificial Sequence
  Synthetic
gctctcaagagcatcttccc

SEQ ID NO: 4758 - DNA, 20 bp, Artificial Sequence
  Synthetic
ggcacaggacatgatgctcc

SEQ ID NO: 4759 - DNA, 20 bp, Artificial Sequence
  Synthetic
gcacaggacatgatgctcct

SEQ ID NO: 4760 - DNA, 20 bp, Artificial Sequence
  Synthetic
gtggattcaaaggagggtgg

SEQ ID NO: 4761 - DNA, 20 bp, Artificial Sequence
  Synthetic
ggttaagggaatgatcactt

SEQ ID NO: 4762 - DNA, 20 bp, Artificial Sequence
  Synthetic
gctagtaatagtaaccagat

SEQ ID NO: 4763 - DNA, 20 bp, Artificial Sequence
  Synthetic
ggagaatttaattccctcac

SEQ ID NO: 4764 - DNA, 20 bp, Artificial Sequence
  Synthetic
gcctttggatgagaggacta

SEQ ID NO: 4765 - DNA, 20 bp, Artificial Sequence
  Synthetic
gcttatgataatctagaact

SEQ ID NO: 4766 - DNA, 20 bp, Artificial Sequence
  Synthetic
gtgaattcataaagagctaa

SEQ ID NO: 4767 - DNA, 20 bp, Artificial Sequence
  Synthetic
ggacactagagctctgctgg

SEQ ID NO: 4768 - DNA, 20 bp, Artificial Sequence
  Synthetic
gagttcaatgttgccttctg

SEQ ID NO: 4769 - DNA, 20 bp, Artificial Sequence
  Synthetic
gaactgaaatgcctcagccg

SEQ ID NO: 4770 - DNA, 20 bp, Artificial Sequence
  Synthetic
gggacaatttagctggaaga

SEQ ID NO: 4771 - DNA, 20 bp, Artificial Sequence
  Synthetic
gaacaataaatcaaccgtgc

SEQ ID NO: 4772 - DNA, 20 bp, Artificial Sequence
  Synthetic
ggaaggatggaagctcggag

SEQ ID NO: 4773 - DNA, 20 bp, Artificial Sequence
  Synthetic
gggaaggatggaagctcgga

SEQ ID NO: 4774 - DNA, 20 bp, Artificial Sequence
  Synthetic
ggaggttggtccctgtagct

SEQ ID NO: 4775 - DNA, 20 bp, Artificial Sequence
  Synthetic
gtcccaaagggccctccaca

SEQ ID NO: 4776 - DNA, 20 bp, Artificial Sequence
  Synthetic
gacacgtgtgctgggaagga

SEQ ID NO: 4777 - DNA, 20 bp, Artificial Sequence
  Synthetic
gtttgtgtactggtaacagt

SEQ ID NO: 4778 - DNA, 20 bp, Artificial Sequence
  Synthetic
ggttagggctgtctttggta

SEQ ID NO: 4779 - DNA, 20 bp, Artificial Sequence
  Synthetic
gaatcctaagcaaccaactt

SEQ ID NO: 4780 - DNA, 20 bp, Artificial Sequence
  Synthetic
gaattcagttgaactctgga

SEQ ID NO: 4781 - DNA, 20 bp, Artificial Sequence
  Synthetic
gggctggaattggagtgtgt

SEQ ID NO: 4782 - DNA, 20 bp, Artificial Sequence
  Synthetic
gtgaactaatgtttactgca

SEQ ID NO: 4783 - DNA, 20 bp, Artificial Sequence
  Synthetic
ggtatgcaaccgcattaact

SEQ ID NO: 4784 - DNA, 20 bp, Artificial Sequence
  Synthetic
gaattatgagaagacagagc

SEQ ID NO: 4785 - DNA, 20 bp, Artificial Sequence
  Synthetic
gatgactctctgtcttgata

SEQ ID NO: 4786 - DNA, 20 bp, Artificial Sequence
  Synthetic
gcactaattaaatgccatct

SEQ ID NO: 4787 - DNA, 20 bp, Artificial Sequence
  Synthetic
gtgttaactataagctgttt

SEQ ID NO: 4788 - DNA, 20 bp, Artificial Sequence
  Synthetic
ggtacatctccagaacgcgc

SEQ ID NO: 4789 - DNA, 20 bp, Artificial Sequence
  Synthetic
gatggatgggtagggaggca

SEQ ID NO: 4790 - DNA, 20 bp, Artificial Sequence
  Synthetic
gcttactgcagggctctgga

SEQ ID NO: 4791 - DNA, 20 bp, Artificial Sequence
  Synthetic
gcagctgacttctgccctcc

SEQ ID NO: 4792 - DNA, 20 bp, Artificial Sequence
  Synthetic
ggagtgtatctgcttgtcct

SEQ ID NO: 4793 - DNA, 20 bp, Artificial Sequence
  Synthetic
gtctttctgacccagaggga

SEQ ID NO: 4794 - DNA, 20 bp, Artificial Sequence
  Synthetic
ggtccctttcccactatgaa

SEQ ID NO: 4795 - DNA, 20 bp, Artificial Sequence
  Synthetic
gactaatctctgccctgatc

SEQ ID NO: 4796 - DNA, 20 bp, Artificial Sequence
  Synthetic
gtttcacagagtttcctcca

SEQ ID NO: 4797 - DNA, 20 bp, Artificial Sequence
  Synthetic
ggcagcctatgacatcagcc

SEQ ID NO: 4798 - DNA, 20 bp, Artificial Sequence
  Synthetic
gctggttatgctatgcaagc

SEQ ID NO: 4799 - DNA, 20 bp, Artificial Sequence
  Synthetic
gcaaagccagagaaggttgc

SEQ ID NO: 4800 - DNA, 20 bp, Artificial Sequence
  Synthetic
gcatgaacatcccagggttg

SEQ ID NO: 4801 - DNA, 20 bp, Artificial Sequence
  Synthetic
gagctggaaagggaggctgg

SEQ ID NO: 4802 - DNA, 20 bp, Artificial Sequence
  Synthetic
ggtgctcatggccactcaga

SEQ ID NO: 4803 - DNA, 20 bp, Artificial Sequence
  Synthetic
ggagccattaagaagaatgg

SEQ ID NO: 4804 - DNA, 20 bp, Artificial Sequence
  Synthetic
ggacagaaaggtgatccatt

SEQ ID NO: 4805 - DNA, 20 bp, Artificial Sequence
  Synthetic
ggtctccagagtggagtccg

SEQ ID NO: 4806 - DNA, 20 bp, Artificial Sequence
  Synthetic
ggatgtggaaatgtcagtgg

SEQ ID NO: 4807 - DNA, 20 bp, Artificial Sequence
  Synthetic
gagatctggcagagggctct

SEQ ID NO: 4808 - DNA, 20 bp, Artificial Sequence
  Synthetic
gctgggtgaaaggtggccag

SEQ ID NO: 4809 - DNA, 20 bp, Artificial Sequence
  Synthetic
gctggtggacagggcaggaa

SEQ ID NO: 4810 - DNA, 20 bp, Artificial Sequence
  Synthetic
gcgttggctatatttatctc

SEQ ID NO: 4811 - DNA, 20 bp, Artificial Sequence
  Synthetic
gtccaaggcagctggtggac

SEQ ID NO: 4812 - DNA, 20 bp, Artificial Sequence
  Synthetic
gcaggaagggaacaagaaag

SEQ ID NO: 4813 - DNA, 20 bp, Artificial Sequence
  Synthetic
gaaaggagcagatgagacgg

SEQ ID NO: 4814 - DNA, 20 bp, Artificial Sequence
  Synthetic
gattgaagtaagagaacaca

SEQ ID NO: 4815 - DNA, 20 bp, Artificial Sequence
  Synthetic
gcttcttcactttgaggagg

SEQ ID NO: 4816 - DNA, 20 bp, Artificial Sequence
  Synthetic
ggcaaagacagaaacccaga

SEQ ID NO: 4817 - DNA, 20 bp, Artificial Sequence
  Synthetic
gagagagtaggcaggaggcc

SEQ ID NO: 4818 - DNA, 20 bp, Artificial Sequence
  Synthetic
gttgtatctgacctgaattc

SEQ ID NO: 4819 - DNA, 20 bp, Artificial Sequence
  Synthetic
gcaaaccaggaagtctctta

SEQ ID NO: 4820 - DNA, 20 bp, Artificial Sequence
  Synthetic
gtgagacatcgaaactctag

SEQ ID NO: 4821 - DNA, 20 bp, Artificial Sequence
  Synthetic
gattagaaccacaactctca

SEQ ID NO: 4822 - DNA, 20 bp, Artificial Sequence
  Synthetic
gctttctgggagtcgtagtt

SEQ ID NO: 4823 - DNA, 20 bp, Artificial Sequence
  Synthetic
gaggtaatgtttaagtagtc

SEQ ID NO: 4824 - DNA, 20 bp, Artificial Sequence
  Synthetic
gcgggactccatggtaacta

SEQ ID NO: 4825 - DNA, 20 bp, Artificial Sequence
  Synthetic
gtttggtcccttagttacca

SEQ ID NO: 4826 - DNA, 20 bp, Artificial Sequence
  Synthetic
ggaagaagagagaagcagaa

SEQ ID NO: 4827 - DNA, 20 bp, Artificial Sequence
  Synthetic
ggtaactaagggaccaaacc

SEQ ID NO: 4828 - DNA, 20 bp, Artificial Sequence
  Synthetic
gtaaggtaacaattatggag

SEQ ID NO: 4829 - DNA, 20 bp, Artificial Sequence
  Synthetic
gtgtcctcagaacttaactt

SEQ ID NO: 4830 - DNA, 20 bp, Artificial Sequence
  Synthetic
gtccttccttgtttatgttc

SEQ ID NO: 4831 - DNA, 20 bp, Artificial Sequence
  Synthetic
ggagttgctgttgaagtcac

SEQ ID NO: 4832 - DNA, 20 bp, Artificial Sequence
  Synthetic
ggagcataaacactgacaat

SEQ ID NO: 4833 - DNA, 20 bp, Artificial Sequence
  Synthetic
gagtttaggaatgggaagga

SEQ ID NO: 4834 - DNA, 20 bp, Artificial Sequence
  Synthetic
gcccagaacataaacaagga

SEQ ID NO: 4835 - DNA, 20 bp, Artificial Sequence
  Synthetic
ggtatccttaaggctctttc

SEQ ID NO: 4836 - DNA, 20 bp, Artificial Sequence
  Synthetic
gtggaaaggtagaggttaat

SEQ ID NO: 4837 - DNA, 20 bp, Artificial Sequence
  Synthetic
ggccagccaggaagtgggaa

SEQ ID NO: 4838 - DNA, 20 bp, Artificial Sequence
  Synthetic
gttggatcctgtgagcggaa

SEQ ID NO: 4839 - DNA, 20 bp, Artificial Sequence
  Synthetic
gagtcaagaacagaagagtg

SEQ ID NO: 4840 - DNA, 20 bp, Artificial Sequence
  Synthetic
gtttgtccgggtgtgtgtgt

SEQ ID NO: 4841 - DNA, 20 bp, Artificial Sequence
  Synthetic
ggaacagtttaggctctttg

SEQ ID NO: 4842 - DNA, 20 bp, Artificial Sequence
  Synthetic
gcctgaacctccactcactc

SEQ ID NO: 4843 - DNA, 20 bp, Artificial Sequence
  Synthetic
gatcacagcacacctggagg

SEQ ID NO: 4844 - DNA, 20 bp, Artificial Sequence
  Synthetic
gtctgtgtgaatacaactac

SEQ ID NO: 4845 - DNA, 20 bp, Artificial Sequence
  Synthetic
gcagtaaggaagggacttta

SEQ ID NO: 4846 - DNA, 20 bp, Artificial Sequence
  Synthetic
gagccactcagactgagtgt

SEQ ID NO: 4847 - DNA, 20 bp, Artificial Sequence
  Synthetic
gaaccgaagcgctcgaagcg

SEQ ID NO: 4848 - DNA, 20 bp, Artificial Sequence
  Synthetic
gtgggaagtttcaggtcaag

SEQ ID NO: 4849 - DNA, 20 bp, Artificial Sequence
  Synthetic
gggaagtttcaggtcaagtg

SEQ ID NO: 4850 - DNA, 20 bp, Artificial Sequence
  Synthetic
gctttccctccctcccagtc

SEQ ID NO: 4851 - DNA, 20 bp, Artificial Sequence
  Synthetic
gtgaattcacagggctggtg

SEQ ID NO: 4852 - DNA, 20 bp, Artificial Sequence
  Synthetic
gcgctctgcgtttctccagc

SEQ ID NO: 4853 - DNA, 20 bp, Artificial Sequence
  Synthetic
ggaagtttcaggtcaagtgg

SEQ ID NO: 4854 - DNA, 20 bp, Artificial Sequence
  Synthetic
gggattaactgtgaattcac

SEQ ID NO: 4855 - DNA, 20 bp, Artificial Sequence
  Synthetic
gctgtaaggtgacccagact

SEQ ID NO: 4856 - DNA, 20 bp, Artificial Sequence
  Synthetic
ggagggagggaaagcttagg

SEQ ID NO: 4857 - DNA, 20 bp, Artificial Sequence
  Synthetic
gggacgctaagggacactct

SEQ ID NO: 4858 - DNA, 20 bp, Artificial Sequence
  Synthetic
gtaccactcactgttctctc

SEQ ID NO: 4859 - DNA, 20 bp, Artificial Sequence
  Synthetic
gtggtactgtaaagaaggtg

SEQ ID NO: 4860 - DNA, 20 bp, Artificial Sequence
  Synthetic
gagaacaggtagaaagaatg

SEQ ID NO: 4861 - DNA, 20 bp, Artificial Sequence
  Synthetic
gaccaggaaacagactccac

SEQ ID NO: 4862 - DNA, 20 bp, Artificial Sequence
  Synthetic
gtcttaaggaagtgtgagaa

SEQ ID NO: 4863 - DNA, 20 bp, Artificial Sequence
  Synthetic
ggaatgaacacagggatgga

SEQ ID NO: 4864 - DNA, 20 bp, Artificial Sequence
  Synthetic
gctcatttgtaagcaccaga

SEQ ID NO: 4865 - DNA, 20 bp, Artificial Sequence
  Synthetic
gtcccttagcgtccctgagc

SEQ ID NO: 4866 - DNA, 20 bp, Artificial Sequence
  Synthetic
gtcctcagcatctccctggc

SEQ ID NO: 4867 - DNA, 20 bp, Artificial Sequence
  Synthetic
gaagaaatctaagtggcaat

SEQ ID NO: 4868 - DNA, 20 bp, Artificial Sequence
  Synthetic
gagcggtgacagcgttcgct

SEQ ID NO: 4869 - DNA, 20 bp, Artificial Sequence
  Synthetic
gctgtaacaaatgttaacat

SEQ ID NO: 4870 - DNA, 20 bp, Artificial Sequence
  Synthetic
ggtctagggaccgtgaccta

SEQ ID NO: 4871 - DNA, 20 bp, Artificial Sequence
  Synthetic
gggattgcctgacaaagcaa

SEQ ID NO: 4872 - DNA, 20 bp, Artificial Sequence
  Synthetic
gacaggagaagaaatctaag

SEQ ID NO: 4873 - DNA, 20 bp, Artificial Sequence
  Synthetic
gcttagtctggagaatgaga

SEQ ID NO: 4874 - DNA, 20 bp, Artificial Sequence
  Synthetic
gtgcactgagtaacacagca

SEQ ID NO: 4875 - DNA, 20 bp, Artificial Sequence
  Synthetic
gcagggatttaaagccaagt

SEQ ID NO: 4876 - DNA, 20 bp, Artificial Sequence
  Synthetic
gaggttctgctgtcacctca

SEQ ID NO: 4877 - DNA, 20 bp, Artificial Sequence
  Synthetic
gcctgtgacttgtgtttcct

SEQ ID NO: 4878 - DNA, 20 bp, Artificial Sequence
  Synthetic
gatggtggcaagggcatgtg

SEQ ID NO: 4879 - DNA, 20 bp, Artificial Sequence
  Synthetic
ggcagacatgccgctgcttt

SEQ ID NO: 4880 - DNA, 20 bp, Artificial Sequence
  Synthetic
gagtgaggtctcagaacaga

SEQ ID NO: 4881 - DNA, 20 bp, Artificial Sequence
  Synthetic
gatgtaaagaacagaccacc

SEQ ID NO: 4882 - DNA, 20 bp, Artificial Sequence
  Synthetic
gtacaagaaggctgtgtgca

SEQ ID NO: 4883 - DNA, 20 bp, Artificial Sequence
  Synthetic
gctcttacatgaagctactt

SEQ ID NO: 4884 - DNA, 20 bp, Artificial Sequence
  Synthetic
ggaaactacctatagatatt

SEQ ID NO: 4885 - DNA, 20 bp, Artificial Sequence
  Synthetic
ggctcttacatgaagctact

SEQ ID NO: 4886 - DNA, 20 bp, Artificial Sequence
  Synthetic
gctttcctctcagtgcaggt

SEQ ID NO: 4887 - DNA, 20 bp, Artificial Sequence
  Synthetic
gtttgttctttctcagatgg

SEQ ID NO: 4888 - DNA, 20 bp, Artificial Sequence
  Synthetic
gcatgcttccttactgtgag

SEQ ID NO: 4889 - DNA, 20 bp, Artificial Sequence
  Synthetic
gtgcctgacctgttatcctg

SEQ ID NO: 4890 - DNA, 20 bp, Artificial Sequence
  Synthetic
gattccgccaccgaggagac

SEQ ID NO: 4891 - DNA, 20 bp, Artificial Sequence
  Synthetic
gccgtggctgtcctgacttg

SEQ ID NO: 4892 - DNA, 20 bp, Artificial Sequence
  Synthetic
ggaactcagcggaacgaatg

SEQ ID NO: 4893 - DNA, 20 bp, Artificial Sequence
  Synthetic
gtccagtcatcaccatattt

SEQ ID NO: 4894 - DNA, 20 bp, Artificial Sequence
  Synthetic
gtaggagggtcgctgggtta

SEQ ID NO: 4895 - DNA, 20 bp, Artificial Sequence
  Synthetic
gttccgctgagttccaaacc

SEQ ID NO: 4896 - DNA, 20 bp, Artificial Sequence
  Synthetic
gaaggagaagccatggaggc

SEQ ID NO: 4897 - DNA, 20 bp, Artificial Sequence
  Synthetic
ggctttgccttatagagact

SEQ ID NO: 4898 - DNA, 20 bp, Artificial Sequence
  Synthetic
ggaacttcatttcagccttt

SEQ ID NO: 4899 - DNA, 20 bp, Artificial Sequence
  Synthetic
ggcaaggtgtgctgaggtgg

SEQ ID NO: 4900 - DNA, 20 bp, Artificial Sequence
  Synthetic
gttaaagatctaaggcagag

SEQ ID NO: 4901 - DNA, 20 bp, Artificial Sequence
  Synthetic
ggaggagccagggaggacaa

SEQ ID NO: 4902 - DNA, 20 bp, Artificial Sequence
  Synthetic
gctgggtagcggcactactc

SEQ ID NO: 4903 - DNA, 20 bp, Artificial Sequence
  Synthetic
gagccctcacattgccagcc

SEQ ID NO: 4904 - DNA, 20 bp, Artificial Sequence
  Synthetic
gagtcatcctcgccatccca

SEQ ID NO: 4905 - DNA, 20 bp, Artificial Sequence
  Synthetic
gttctagctttaagcctgcc

SEQ ID NO: 4906 - DNA, 20 bp, Artificial Sequence
  Synthetic
gcatagttcttggatacctt

SEQ ID NO: 4907 - DNA, 20 bp, Artificial Sequence
  Synthetic
gttatctccgcttgcctgac

SEQ ID NO: 4908 - DNA, 20 bp, Artificial Sequence
  Synthetic
gtcgccagttagagactccg

SEQ ID NO: 4909 - DNA, 20 bp, Artificial Sequence
  Synthetic
gcgcataagaacaaggcagc

SEQ ID NO: 4910 - DNA, 20 bp, Artificial Sequence
  Synthetic
ggtaggagcaggtgaccgtt

SEQ ID NO: 4911 - DNA, 20 bp, Artificial Sequence
  Synthetic
ggtcgggctacctaactcca

SEQ ID NO: 4912 - DNA, 20 bp, Artificial Sequence
  Synthetic
gtaactgcaaggcccttaga

SEQ ID NO: 4913 - DNA, 20 bp, Artificial Sequence
  Synthetic
gaactatgctgggtaacagt

SEQ ID NO: 4914 - DNA, 20 bp, Artificial Sequence
  Synthetic
gtcagaaccttgccttctaa

SEQ ID NO: 4915 - DNA, 20 bp, Artificial Sequence
  Synthetic
gtgaaagtatgtgtgtgttg

SEQ ID NO: 4916 - DNA, 20 bp, Artificial Sequence
  Synthetic
gtgcatctgggtaccaggga

SEQ ID NO: 4917 - DNA, 20 bp, Artificial Sequence
  Synthetic
gattagaagagccactctgg

SEQ ID NO: 4918 - DNA, 20 bp, Artificial Sequence
  Synthetic
gtgtctgtgtgtaaacctgg

SEQ ID NO: 4919 - DNA, 20 bp, Artificial Sequence
  Synthetic
gagggttcatccaggattca

SEQ ID NO: 4920 - DNA, 20 bp, Artificial Sequence
  Synthetic
gagagggaaagtttcatatg

SEQ ID NO: 4921 - DNA, 20 bp, Artificial Sequence
  Synthetic
gtagagctaaagtgagtctt

SEQ ID NO: 4922 - DNA, 20 bp, Artificial Sequence
  Synthetic
gttgtaacatgggagatcca

SEQ ID NO: 4923 - DNA, 20 bp, Artificial Sequence
  Synthetic
gtgtcaccgctatgattctt

SEQ ID NO: 4924 - DNA, 20 bp, Artificial Sequence
  Synthetic
gtgctgctgccacatgtcaa

SEQ ID NO: 4925 - DNA, 20 bp, Artificial Sequence
  Synthetic
ggctgctgggagttgtgcaa

SEQ ID NO: 4926 - DNA, 20 bp, Artificial Sequence
  Synthetic
gtgcactactgaatccaaga

SEQ ID NO: 4927 - DNA, 20 bp, Artificial Sequence
  Synthetic
gtcaatcagtagcaggcaaa

SEQ ID NO: 4928 - DNA, 20 bp, Artificial Sequence
  Synthetic
gattggccggcggtaattac

SEQ ID NO: 4929 - DNA, 20 bp, Artificial Sequence
  Synthetic
gaattgtcacaaggtcagac

SEQ ID NO: 4930 - DNA, 20 bp, Artificial Sequence
  Synthetic
gagcaagatttcaggagaag

SEQ ID NO: 4931 - DNA, 20 bp, Artificial Sequence
  Synthetic
gcataatttatgctcgcggg

SEQ ID NO: 4932 - DNA, 20 bp, Artificial Sequence
  Synthetic
gctgtcacagggacagaaag

SEQ ID NO: 4933 - DNA, 20 bp, Artificial Sequence
  Synthetic
ggccctgtatttatttcttt

SEQ ID NO: 4934 - DNA, 20 bp, Artificial Sequence
  Synthetic
ggctggctgtctattaagtc

SEQ ID NO: 4935 - DNA, 20 bp, Artificial Sequence
  Synthetic
gaataaaggatgggaacagt

SEQ ID NO: 4936 - DNA, 20 bp, Artificial Sequence
  Synthetic
gtttcctctcaagtccagca

SEQ ID NO: 4937 - DNA, 20 bp, Artificial Sequence
  Synthetic
gtatgacctctgctccgctc

SEQ ID NO: 4938 - DNA, 20 bp, Artificial Sequence
  Synthetic
gtcacgtacgtgtgccagac

SEQ ID NO: 4939 - DNA, 20 bp, Artificial Sequence
  Synthetic
ggacttcaacacacgccatc

SEQ ID NO: 4940 - DNA, 20 bp, Artificial Sequence
  Synthetic
gatgaaaggagagtcttggg

SEQ ID NO: 4941 - DNA, 20 bp, Artificial Sequence
  Synthetic
gagggctacggagcaggatt

SEQ ID NO: 4942 - DNA, 20 bp, Artificial Sequence
  Synthetic
gccaaacagacccttagtgg

SEQ ID NO: 4943 - DNA, 20 bp, Artificial Sequence
  Synthetic
gaaacgtgtctatgactgtt

SEQ ID NO: 4944 - DNA, 20 bp, Artificial Sequence
  Synthetic
gggaggtggtaggattgggt

SEQ ID NO: 4945 - DNA, 20 bp, Artificial Sequence
  Synthetic
ggattccggacaaagggcag

SEQ ID NO: 4946 - DNA, 20 bp, Artificial Sequence
  Synthetic
gcccattagtctcacgggat

SEQ ID NO: 4947 - DNA, 20 bp, Artificial Sequence
  Synthetic
gtgaagctgctagtcctctc

SEQ ID NO: 4948 - DNA, 20 bp, Artificial Sequence
  Synthetic
gcatgggaggaagctatggc

SEQ ID NO: 4949 - DNA, 20 bp, Artificial Sequence
  Synthetic
gggtagaccttcctgtgaac

SEQ ID NO: 4950 - DNA, 20 bp, Artificial Sequence
  Synthetic
gaggacagagtgaccagaga

SEQ ID NO: 4951 - DNA, 20 bp, Artificial Sequence
  Synthetic
gccctttaagtcactttccc

SEQ ID NO: 4952 - DNA, 20 bp, Artificial Sequence
  Synthetic
gacaatgtcttaaggctcac

SEQ ID NO: 4953 - DNA, 20 bp, Artificial Sequence
  Synthetic
gtatcttcctatgtggctaa

SEQ ID NO: 4954 - DNA, 20 bp, Artificial Sequence
  Synthetic
gccatgcatagtggtgtgac

SEQ ID NO: 4955 - DNA, 20 bp, Artificial Sequence
  Synthetic
gggaattctagtctccaact

SEQ ID NO: 4956 - DNA, 20 bp, Artificial Sequence
  Synthetic
ggcaatgacagcctacgcac

SEQ ID NO: 4957 - DNA, 20 bp, Artificial Sequence
  Synthetic
gtccttcaaactctggttct

SEQ ID NO: 4958 - DNA, 20 bp, Artificial Sequence
  Synthetic
ggcccagtggtgatccaagt

SEQ ID NO: 4959 - DNA, 20 bp, Artificial Sequence
  Synthetic
gtctcggactgtgatggctg

SEQ ID NO: 4960 - DNA, 20 bp, Artificial Sequence
  Synthetic
gatggtgtgtgtgtgtgtgg

SEQ ID NO: 4961 - DNA, 20 bp, Artificial Sequence
  Synthetic
gagcaagaagccagcagtga

SEQ ID NO: 4962 - DNA, 20 bp, Artificial Sequence
  Synthetic
gaaaggatcccacttccggt

SEQ ID NO: 4963 - DNA, 20 bp, Artificial Sequence
  Synthetic
gtgtcctcctaagtacacca

SEQ ID NO: 4964 - DNA, 20 bp, Artificial Sequence
  Synthetic
gtgttatgggccaacgtgtt

SEQ ID NO: 4965 - DNA, 20 bp, Artificial Sequence
  Synthetic
gggaatggagttccacagct

SEQ ID NO: 4966 - DNA, 20 bp, Artificial Sequence
  Synthetic
gtgaatggtcgaatttactc

SEQ ID NO: 4967 - DNA, 20 bp, Artificial Sequence
  Synthetic
gctaatgtcaatgacagttt

SEQ ID NO: 4968 - DNA, 20 bp, Artificial Sequence
  Synthetic
gtgtaatgcacacgcgtgcg

SEQ ID NO: 4969 - DNA, 20 bp, Artificial Sequence
  Synthetic
gtatcagatgttcagatgaa

SEQ ID NO: 4970 - DNA, 20 bp, Artificial Sequence
  Synthetic
gctgatcccgggctgggaaa

SEQ ID NO: 4971 - DNA, 20 bp, Artificial Sequence
  Synthetic
gagctgatttgtagccactt

SEQ ID NO: 4972 - DNA, 20 bp, Artificial Sequence
  Synthetic
gacctggatgtcagccagga

SEQ ID NO: 4973 - DNA, 20 bp, Artificial Sequence
  Synthetic
gggacgaaacgggaaggaaa

SEQ ID NO: 4974 - DNA, 20 bp, Artificial Sequence
  Synthetic
gccgcttgtttatgtaaacc

SEQ ID NO: 4975 - DNA, 20 bp, Artificial Sequence
  Synthetic
ggacccagtacagggctgac

SEQ ID NO: 4976 - DNA, 20 bp, Artificial Sequence
  Synthetic
gactcctgggaaagagttga

SEQ ID NO: 4977 - DNA, 20 bp, Artificial Sequence
  Synthetic
gaccagccggacgcattgag

SEQ ID NO: 4978 - DNA, 20 bp, Artificial Sequence
  Synthetic
ggctaacttgagcatcacgt

SEQ ID NO: 4979 - DNA, 20 bp, Artificial Sequence
  Synthetic
gctagatgctgctggaagag

SEQ ID NO: 4980 - DNA, 20 bp, Artificial Sequence
  Synthetic
gacggaacggattggagggt

SEQ ID NO: 4981 - DNA, 20 bp, Artificial Sequence
  Synthetic
ggccgtgggaaagcaccttg

SEQ ID NO: 4982 - DNA, 20 bp, Artificial Sequence
  Synthetic
gtcttgagacagccagaccc

SEQ ID NO: 4983 - DNA, 20 bp, Artificial Sequence
  Synthetic
gtctctttggagggtggccc

SEQ ID NO: 4984 - DNA, 20 bp, Artificial Sequence
  Synthetic
gcttctgctggtttctctcc

SEQ ID NO: 4985 - DNA, 20 bp, Artificial Sequence
  Synthetic
gtttgcacgcagctcctgca

SEQ ID NO: 4986 - DNA, 20 bp, Artificial Sequence
  Synthetic
gagataaagccagctttgat

SEQ ID NO: 4987 - DNA, 20 bp, Artificial Sequence
  Synthetic
gcgtaaacacatgcgttgcc

SEQ ID NO: 4988 - DNA, 20 bp, Artificial Sequence
  Synthetic
gtttgtagaaacctatgcct

SEQ ID NO: 4989 - DNA, 20 bp, Artificial Sequence
  Synthetic
ggtgatgactcactagccct

SEQ ID NO: 4990 - DNA, 20 bp, Artificial Sequence
  Synthetic
gcacagtaagaggagattgg

SEQ ID NO: 4991 - DNA, 20 bp, Artificial Sequence
  Synthetic
gaagttggtatggagggatg

SEQ ID NO: 4992 - DNA, 20 bp, Artificial Sequence
  Synthetic
ggagctcatgtcgaggaagt

SEQ ID NO: 4993 - DNA, 20 bp, Artificial Sequence
  Synthetic
ggtgaaaggagtatgcatgt

SEQ ID NO: 4994 - DNA, 20 bp, Artificial Sequence
  Synthetic
gtgaaaggagtatgcatgtt

SEQ ID NO: 4995 - DNA, 20 bp, Artificial Sequence
  Synthetic
gctacaggagtagtagaaac

SEQ ID NO: 4996 - DNA, 20 bp, Artificial Sequence
  Synthetic
gcgataggtcggtgaggagg

SEQ ID NO: 4997 - DNA, 20 bp, Artificial Sequence
  Synthetic
gatggtgagcaagagcttta

SEQ ID NO: 4998 - DNA, 20 bp, Artificial Sequence
  Synthetic
gctactaagtgagcctcagg

SEQ ID NO: 4999 - DNA, 20 bp, Artificial Sequence
  Synthetic
gcattcagatcagcaggaag

SEQ ID NO: 5000 - DNA, 20 bp, Artificial Sequence
  Synthetic
gggaacccacgtaggccaat

SEQ ID NO: 5001 - DNA, 20 bp, Artificial Sequence
  Synthetic
ggagaacagacccggaaact

SEQ ID NO: 5002 - DNA, 20 bp, Artificial Sequence
  Synthetic
ggtcttccagacgagggaag

SEQ ID NO: 5003 - DNA, 20 bp, Artificial Sequence
  Synthetic
ggcagggaggagaagcttgg

SEQ ID NO: 5004 - DNA, 20 bp, Artificial Sequence
  Synthetic
ggctctgagctgctctgtag

SEQ ID NO: 5005 - DNA, 20 bp, Artificial Sequence
  Synthetic
gacagtgaggtgccctttct

SEQ ID NO: 5006 - DNA, 20 bp, Artificial Sequence
  Synthetic
gtggtggctaagaactgcaa

SEQ ID NO: 5007 - DNA, 20 bp, Artificial Sequence
  Synthetic
ggagatttgccaggtttatt

SEQ ID NO: 5008 - DNA, 20 bp, Artificial Sequence
  Synthetic
gaaacactgcccaggatcaa

SEQ ID NO: 5009 - DNA, 20 bp, Artificial Sequence
  Synthetic
gaactgcaaaggctccttgg

SEQ ID NO: 5010 - DNA, 20 bp, Artificial Sequence
  Synthetic
gtaacctgagaagaacccaa

SEQ ID NO: 5011 - DNA, 20 bp, Artificial Sequence
  Synthetic
gatcctcaaggagtgtgttg

SEQ ID NO: 5012 - DNA, 20 bp, Artificial Sequence
  Synthetic
gggaatatggaggcaggatg

SEQ ID NO: 5013 - DNA, 20 bp, Artificial Sequence
  Synthetic
gacagagctctgccttggga

SEQ ID NO: 5014 - DNA, 20 bp, Artificial Sequence
  Synthetic
gacactatgggaacttgcta

SEQ ID NO: 5015 - DNA, 20 bp, Artificial Sequence
  Synthetic
gggcaatttccgccagaact

SEQ ID NO: 5016 - DNA, 20 bp, Artificial Sequence
  Synthetic
gaagtgggctgtaatgcctc

SEQ ID NO: 5017 - DNA, 20 bp, Artificial Sequence
  Synthetic
gcaaattggactcagatacc

SEQ ID NO: 5018 - DNA, 20 bp, Artificial Sequence
  Synthetic
gtctatgcaatccactcagg

SEQ ID NO: 5019 - DNA, 20 bp, Artificial Sequence
  Synthetic
gggatggctttatagcaaga

SEQ ID NO: 5020 - DNA, 20 bp, Artificial Sequence
  Synthetic
gtgtctcctaaagaccgaca

SEQ ID NO: 5021 - DNA, 20 bp, Artificial Sequence
  Synthetic
gtgggtaactggcatatctg

SEQ ID NO: 5022 - DNA, 20 bp, Artificial Sequence
  Synthetic
gaattgttggtcattgtgat

SEQ ID NO: 5023 - DNA, 20 bp, Artificial Sequence
  Synthetic
gggtggtgcagtgagagtcc

SEQ ID NO: 5024 - DNA, 20 bp, Artificial Sequence
  Synthetic
gactagccatcgtcttctta

SEQ ID NO: 5025 - DNA, 20 bp, Artificial Sequence
  Synthetic
gtaaactccctttagctcct

SEQ ID NO: 5026 - DNA, 20 bp, Artificial Sequence
  Synthetic
ggcagcctaggtaacaagtt

SEQ ID NO: 5027 - DNA, 20 bp, Artificial Sequence
  Synthetic
gctaggtaacaggcggtggg

SEQ ID NO: 5028 - DNA, 20 bp, Artificial Sequence
  Synthetic
gaccctcaaggacggaatct

SEQ ID NO: 5029 - DNA, 20 bp, Artificial Sequence
  Synthetic
gggtaccggtttccgttgcc

SEQ ID NO: 5030 - DNA, 20 bp, Artificial Sequence
  Synthetic
gcagctaggtaacaggcggt

SEQ ID NO: 5031 - DNA, 20 bp, Artificial Sequence
  Synthetic
gatgtttgtatgcgacagtg

SEQ ID NO: 5032 - DNA, 20 bp, Artificial Sequence
  Synthetic
ggttctgcaggtccaaatca

SEQ ID NO: 5033 - DNA, 20 bp, Artificial Sequence
  Synthetic
gtgagacatctaaggcaaga

SEQ ID NO: 5034 - DNA, 20 bp, Artificial Sequence
  Synthetic
gagattactgtatgaccttg

SEQ ID NO: 5035 - DNA, 20 bp, Artificial Sequence
  Synthetic
ggcattcctttcttcacctc

SEQ ID NO: 5036 - DNA, 20 bp, Artificial Sequence
  Synthetic
gagaggaggatcaacagtgg

SEQ ID NO: 5037 - DNA, 20 bp, Artificial Sequence
  Synthetic
ggcagttaaagaagtatgtt

SEQ ID NO: 5038 - DNA, 20 bp, Artificial Sequence
  Synthetic
gctctcctgccgacagaggt

SEQ ID NO: 5039 - DNA, 20 bp, Artificial Sequence
  Synthetic
ggagctgccactccctgatt

SEQ ID NO: 5040 - DNA, 20 bp, Artificial Sequence
  Synthetic
gggcacgtgggagaagtgga

SEQ ID NO: 5041 - DNA, 20 bp, Artificial Sequence
  Synthetic
gtggtccaggtcactaccac

SEQ ID NO: 5042 - DNA, 20 bp, Artificial Sequence
  Synthetic
ggaaagttggagaagttggg

SEQ ID NO: 5043 - DNA, 20 bp, Artificial Sequence
  Synthetic
gggtgggagtggaggaaagt

SEQ ID NO: 5044 - DNA, 20 bp, Artificial Sequence
  Synthetic
gtgctgcaatgctggcagct

SEQ ID NO: 5045 - DNA, 20 bp, Artificial Sequence
  Synthetic
gctgccagcattgcagcact

SEQ ID NO: 5046 - DNA, 20 bp, Artificial Sequence
  Synthetic
gtcactaccacagggctgcc

SEQ ID NO: 5047 - DNA, 20 bp, Artificial Sequence
  Synthetic
gcaatctccaacagcacacg

SEQ ID NO: 5048 - DNA, 20 bp, Artificial Sequence
  Synthetic
ggagaagttgggaggagaca

SEQ ID NO: 5049 - DNA, 20 bp, Artificial Sequence
  Synthetic
ggacacactcatatctgttc

SEQ ID NO: 5050 - DNA, 20 bp, Artificial Sequence
  Synthetic
gataggagagaaagcaggag

SEQ ID NO: 5051 - DNA, 20 bp, Artificial Sequence
  Synthetic
gcaaaggctgtagttggaac

SEQ ID NO: 5052 - DNA, 20 bp, Artificial Sequence
  Synthetic
gccaactgaaccagaaagca

SEQ ID NO: 5053 - DNA, 20 bp, Artificial Sequence
  Synthetic
gtagttatataggctagtgt

SEQ ID NO: 5054 - DNA, 20 bp, Artificial Sequence
  Synthetic
gatgccgtagaaatgaattc

SEQ ID NO: 5055 - DNA, 20 bp, Artificial Sequence
  Synthetic
gttcacaatcttgaggaggg

SEQ ID NO: 5056 - DNA, 20 bp, Artificial Sequence
  Synthetic
gaaacaacagtggtttagct

SEQ ID NO: 5057 - DNA, 20 bp, Artificial Sequence
  Synthetic
ggatttacccttcctaacaa

SEQ ID NO: 5058 - DNA, 20 bp, Artificial Sequence
  Synthetic
gcataggacattcgggatcc

SEQ ID NO: 5059 - DNA, 20 bp, Artificial Sequence
  Synthetic
gtttgcttaagcacatcctg

SEQ ID NO: 5060 - DNA, 20 bp, Artificial Sequence
  Synthetic
gtttgagcatttccctaatg

SEQ ID NO: 5061 - DNA, 20 bp, Artificial Sequence
  Synthetic
gctccatgtcgccctagctt

SEQ ID NO: 5062 - DNA, 20 bp, Artificial Sequence
  Synthetic
gaaataacctctccctgggc

SEQ ID NO: 5063 - DNA, 20 bp, Artificial Sequence
  Synthetic
gaacttgattcccgggaccc

SEQ ID NO: 5064 - DNA, 20 bp, Artificial Sequence
  Synthetic
gggtgccaggatttcgctgg

SEQ ID NO: 5065 - DNA, 20 bp, Artificial Sequence
  Synthetic
gttaaagctggtattatcag

SEQ ID NO: 5066 - DNA, 20 bp, Artificial Sequence
  Synthetic
gaacgcgcgtttgcaggagg

SEQ ID NO: 5067 - DNA, 20 bp, Artificial Sequence
  Synthetic
gaagcaataacagtgtggtg

SEQ ID NO: 5068 - DNA, 20 bp, Artificial Sequence
  Synthetic
gagaaagcagaggtctcagg

SEQ ID NO: 5069 - DNA, 20 bp, Artificial Sequence
  Synthetic
gagagagtgcccgcgcgaaa

SEQ ID NO: 5070 - DNA, 20 bp, Artificial Sequence
  Synthetic
gggcgcgcatccaatctgac

SEQ ID NO: 5071 - DNA, 20 bp, Artificial Sequence
  Synthetic
gtgctgtccctaatataggg

SEQ ID NO: 5072 - DNA, 20 bp, Artificial Sequence
  Synthetic
gacttgtgagtggacactgg

SEQ ID NO: 5073 - DNA, 20 bp, Artificial Sequence
  Synthetic
gtcactcacaggcatctcct

SEQ ID NO: 5074 - DNA, 20 bp, Artificial Sequence
  Synthetic
gttggctcggtagtgacacc

SEQ ID NO: 5075 - DNA, 20 bp, Artificial Sequence
  Synthetic
gctgctgcagggactcaggt

SEQ ID NO: 5076 - DNA, 20 bp, Artificial Sequence
  Synthetic
gagctatccatttgtagagg

SEQ ID NO: 5077 - DNA, 20 bp, Artificial Sequence
  Synthetic
ggtggtttggtcagtatccg

SEQ ID NO: 5078 - DNA, 20 bp, Artificial Sequence
  Synthetic
gacatgggatgtgagggctg

SEQ ID NO: 5079 - DNA, 20 bp, Artificial Sequence
  Synthetic
gtcactaacccagcagggtt

SEQ ID NO: 5080 - DNA, 20 bp, Artificial Sequence
  Synthetic
gaaatgggagacagagcatc

SEQ ID NO: 5081 - DNA, 20 bp, Artificial Sequence
  Synthetic
gtgcgtcactgtcaggaata

SEQ ID NO: 5082 - DNA, 20 bp, Artificial Sequence
  Synthetic
gatccctaagtaggtagaat

SEQ ID NO: 5083 - DNA, 20 bp, Artificial Sequence
  Synthetic
gaaatgtcccgctcctctcc

SEQ ID NO: 5084 - DNA, 20 bp, Artificial Sequence
  Synthetic
gcgtccggtgttacaccctg

SEQ ID NO: 5085 - DNA, 20 bp, Artificial Sequence
  Synthetic
gaacttgcctgactcaccca

SEQ ID NO: 5086 - DNA, 20 bp, Artificial Sequence
  Synthetic
gaggataaatctcctttcac

SEQ ID NO: 5087 - DNA, 20 bp, Artificial Sequence
  Synthetic
ggtggcaaggtccttgagct

SEQ ID NO: 5088 - DNA, 20 bp, Artificial Sequence
  Synthetic
gtttcccggagagccacaga

SEQ ID NO: 5089 - DNA, 20 bp, Artificial Sequence
  Synthetic
gggaggaatagagcaaatga

SEQ ID NO: 5090 - DNA, 20 bp, Artificial Sequence
  Synthetic
gccattgaacagaaaggcca

SEQ ID NO: 5091 - DNA, 20 bp, Artificial Sequence
  Synthetic
gggaaagtccacacaagttg

SEQ ID NO: 5092 - DNA, 20 bp, Artificial Sequence
  Synthetic
ggccatgtttgcaattgttt

SEQ ID NO: 5093 - DNA, 20 bp, Artificial Sequence
  Synthetic
ggcgctgccttcccgtatat

SEQ ID NO: 5094 - DNA, 20 bp, Artificial Sequence
  Synthetic
gtgctgcccgtttagggtat

SEQ ID NO: 5095 - DNA, 20 bp, Artificial Sequence
  Synthetic
gcgtccatgctcataaacca

SEQ ID NO: 5096 - DNA, 20 bp, Artificial Sequence
  Synthetic
gtcccaaacctctgagatgg

SEQ ID NO: 5097 - DNA, 20 bp, Artificial Sequence
  Synthetic
gtaggacatagagaactgtt

SEQ ID NO: 5098 - DNA, 20 bp, Artificial Sequence
  Synthetic
gaaggcagagggcctttagg

SEQ ID NO: 5099 - DNA, 20 bp, Artificial Sequence
  Synthetic
gactctctaatatacagtgt

SEQ ID NO: 5100 - DNA, 20 bp, Artificial Sequence
  Synthetic
gaaattgtaacctacgggcc

SEQ ID NO: 5101 - DNA, 20 bp, Artificial Sequence
  Synthetic
gatttgtagaagtttgagtg

SEQ ID NO: 5102 - DNA, 20 bp, Artificial Sequence
  Synthetic
gccattactgaggcgttgaa

SEQ ID NO: 5103 - DNA, 20 bp, Artificial Sequence
  Synthetic
gatcgctccatagagcggac

SEQ ID NO: 5104 - DNA, 20 bp, Artificial Sequence
  Synthetic
gtctcactactgagttcaag

SEQ ID NO: 5105 - DNA, 20 bp, Artificial Sequence
  Synthetic
gttgattacagggctcttta

SEQ ID NO: 5106 - DNA, 20 bp, Artificial Sequence
  Synthetic
gttctaaccaatgatgccta

SEQ ID NO: 5107 - DNA, 20 bp, Artificial Sequence
  Synthetic
gaggctctggagaactccca

SEQ ID NO: 5108 - DNA, 20 bp, Artificial Sequence
  Synthetic
gtttggttgttccatggcag

SEQ ID NO: 5109 - DNA, 20 bp, Artificial Sequence
  Synthetic
gtttgctccaggctgcggag

SEQ ID NO: 5110 - DNA, 20 bp, Artificial Sequence
  Synthetic
gatgtttattctgtaagtgg

SEQ ID NO: 5111 - DNA, 20 bp, Artificial Sequence
  Synthetic
gagggacctcctagctggga

SEQ ID NO: 5112 - DNA, 20 bp, Artificial Sequence
  Synthetic
gaggactttagatgacaggc

SEQ ID NO: 5113 - DNA, 20 bp, Artificial Sequence
  Synthetic
gggacctcctagctgggaag

SEQ ID NO: 5114 - DNA, 20 bp, Artificial Sequence
  Synthetic
gctgtgcacaggcaagctaa

SEQ ID NO: 5115 - DNA, 20 bp, Artificial Sequence
  Synthetic
gcctttcaagtcaaatagtt

SEQ ID NO: 5116 - DNA, 20 bp, Artificial Sequence
  Synthetic
gtgcgctgtgagtgcgtgtg

SEQ ID NO: 5117 - DNA, 20 bp, Artificial Sequence
  Synthetic
ggactttagatgacaggctg

SEQ ID NO: 5118 - DNA, 20 bp, Artificial Sequence
  Synthetic
gacagggtggtgtgaaactt

SEQ ID NO: 5119 - DNA, 20 bp, Artificial Sequence
  Synthetic
gttctttgggtagaaaggaa

SEQ ID NO: 5120 - DNA, 20 bp, Artificial Sequence
  Synthetic
gccggcggccatattgataa

SEQ ID NO: 5121 - DNA, 20 bp, Artificial Sequence
  Synthetic
gtacaggcctgagagcacga

SEQ ID NO: 5122 - DNA, 20 bp, Artificial Sequence
  Synthetic
ggagatgcagtgaaggtagg

SEQ ID NO: 5123 - DNA, 20 bp, Artificial Sequence
  Synthetic
gagctgtgacagcctgctgt

SEQ ID NO: 5124 - DNA, 20 bp, Artificial Sequence
  Synthetic
ggcgagactggactgaagga

SEQ ID NO: 5125 - DNA, 20 bp, Artificial Sequence
  Synthetic
gcattcagtggttgtaggca

SEQ ID NO: 5126 - DNA, 20 bp, Artificial Sequence
  Synthetic
gtcgtataagtgaagtgata

SEQ ID NO: 5127 - DNA, 20 bp, Artificial Sequence
  Synthetic
ggagtaccgggcaaactctg

SEQ ID NO: 5128 - DNA, 20 bp, Artificial Sequence
  Synthetic
gggagacaggatctacctga

SEQ ID NO: 5129 - DNA, 20 bp, Artificial Sequence
  Synthetic
gcggtgtcaaatccaggaag

SEQ ID NO: 5130 - DNA, 20 bp, Artificial Sequence
  Synthetic
gcgcccgctctcggtagtaa

SEQ ID NO: 5131 - DNA, 20 bp, Artificial Sequence
  Synthetic
gcctgcgtggtatataattc

SEQ ID NO: 5132 - DNA, 20 bp, Artificial Sequence
  Synthetic
gtagctattctgaagaggga

SEQ ID NO: 5133 - DNA, 20 bp, Artificial Sequence
  Synthetic
gccctcctccaagcagggaa

SEQ ID NO: 5134 - DNA, 20 bp, Artificial Sequence
  Synthetic
gttgccctccttagggtagg

SEQ ID NO: 5135 - DNA, 20 bp, Artificial Sequence
  Synthetic
gggtcatccttcacctgcaa

SEQ ID NO: 5136 - DNA, 20 bp, Artificial Sequence
  Synthetic
gagaagcagggttgaagcag

SEQ ID NO: 5137 - DNA, 20 bp, Artificial Sequence
  Synthetic
gcttagaaataggtgggcag

SEQ ID NO: 5138 - DNA, 20 bp, Artificial Sequence
  Synthetic
gaggattgtcgaatgggtgc

SEQ ID NO: 5139 - DNA, 20 bp, Artificial Sequence
  Synthetic
gctaccattctcccttgtgg

SEQ ID NO: 5140 - DNA, 20 bp, Artificial Sequence
  Synthetic
ggtacagggtggaagtcggc

SEQ ID NO: 5141 - DNA, 20 bp, Artificial Sequence
  Synthetic
gaggagggtgtcctagaatt

SEQ ID NO: 5142 - DNA, 20 bp, Artificial Sequence
  Synthetic
gctgtgtgcctgaggtggct

SEQ ID NO: 5143 - DNA, 20 bp, Artificial Sequence
  Synthetic
ggaaggccttaaatgcacag

SEQ ID NO: 5144 - DNA, 20 bp, Artificial Sequence
  Synthetic
ggtagtaagccaacttggta

SEQ ID NO: 5145 - DNA, 20 bp, Artificial Sequence
  Synthetic
gtaaatctggctagtaagaa

SEQ ID NO: 5146 - DNA, 20 bp, Artificial Sequence
  Synthetic
ggatgagaacgccggcctct

SEQ ID NO: 5147 - DNA, 20 bp, Artificial Sequence
  Synthetic
ggtaaatctggctagtaaga

SEQ ID NO: 5148 - DNA, 20 bp, Artificial Sequence
  Synthetic
gctgcgcactacgcgttgct

SEQ ID NO: 5149 - DNA, 20 bp, Artificial Sequence
  Synthetic
ggaaacagtcatgctgttac

SEQ ID NO: 5150 - DNA, 20 bp, Artificial Sequence
  Synthetic
gtctacagtaatatcagcta

SEQ ID NO: 5151 - DNA, 20 bp, Artificial Sequence
  Synthetic
gggttgtgcattgaggcaac

SEQ ID NO: 5152 - DNA, 20 bp, Artificial Sequence
  Synthetic
gcaggaagggctatagccca

SEQ ID NO: 5153 - DNA, 20 bp, Artificial Sequence
  Synthetic
gtaatacatgcctctaatct

SEQ ID NO: 5154 - DNA, 20 bp, Artificial Sequence
  Synthetic
gatagtctgtgatgtaatct

SEQ ID NO: 5155 - DNA, 20 bp, Artificial Sequence
  Synthetic
ggagcaggaggtctttccca

SEQ ID NO: 5156 - DNA, 20 bp, Artificial Sequence
  Synthetic
gaaacattctagggtgctga

SEQ ID NO: 5157 - DNA, 20 bp, Artificial Sequence
  Synthetic
gtaatttcactgcttctgat

SEQ ID NO: 5158 - DNA, 20 bp, Artificial Sequence
  Synthetic
ggtcctagtcctccttatcc

SEQ ID NO: 5159 - DNA, 20 bp, Artificial Sequence
  Synthetic
gacccaggtcccgcagactt

SEQ ID NO: 5160 - DNA, 20 bp, Artificial Sequence
  Synthetic
gcacagtgagctacagtata

SEQ ID NO: 5161 - DNA, 20 bp, Artificial Sequence
  Synthetic
gcaaagatgaggagagagga

SEQ ID NO: 5162 - DNA, 20 bp, Artificial Sequence
  Synthetic
gaagaaccttgagagaccac

SEQ ID NO: 5163 - DNA, 20 bp, Artificial Sequence
  Synthetic
gttcatcccaactccctaca

SEQ ID NO: 5164 - DNA, 20 bp, Artificial Sequence
  Synthetic
ggaacgaaggcctgaggagg

SEQ ID NO: 5165 - DNA, 20 bp, Artificial Sequence
  Synthetic
gtgttaaggcgtcatccaaa

SEQ ID NO: 5166 - DNA, 20 bp, Artificial Sequence
  Synthetic
gggaagacagagaggtaggg

SEQ ID NO: 5167 - DNA, 20 bp, Artificial Sequence
  Synthetic
ggaggtggaagatccaagaa

SEQ ID NO: 5168 - DNA, 20 bp, Artificial Sequence
  Synthetic
ggagtgacgatgtgggagag

SEQ ID NO: 5169 - DNA, 20 bp, Artificial Sequence
  Synthetic
gtccctggtcaccctcgtgt

SEQ ID NO: 5170 - DNA, 20 bp, Artificial Sequence
  Synthetic
gaaggctgggcatctgtgag

SEQ ID NO: 5171 - DNA, 20 bp, Artificial Sequence
  Synthetic
gagaggaaggtttcccagcc

SEQ ID NO: 5172 - DNA, 20 bp, Artificial Sequence
  Synthetic
gaaagcacagctgctaggat

SEQ ID NO: 5173 - DNA, 20 bp, Artificial Sequence
  Synthetic
ggaacagggagacaggaggt

SEQ ID NO: 5174 - DNA, 20 bp, Artificial Sequence
  Synthetic
gtgtcacagcaagctgatga

SEQ ID NO: 5175 - DNA, 20 bp, Artificial Sequence
  Synthetic
gggagccaggagtgacgatg

SEQ ID NO: 5176 - DNA, 20 bp, Artificial Sequence
  Synthetic
gggatacctgggttgagcag

SEQ ID NO: 5177 - DNA, 20 bp, Artificial Sequence
  Synthetic
gaggatgctcaaaccatggc

SEQ ID NO: 5178 - DNA, 20 bp, Artificial Sequence
  Synthetic
gcgggatcagttggctgtgg

SEQ ID NO: 5179 - DNA, 20 bp, Artificial Sequence
  Synthetic
ggcgggagtcaaagccagtg

SEQ ID NO: 5180 - DNA, 20 bp, Artificial Sequence
  Synthetic
gggagcaaagaccaagatgg

SEQ ID NO: 5181 - DNA, 20 bp, Artificial Sequence
  Synthetic
gtcaaagccagtgaggatgg

SEQ ID NO: 5182 - DNA, 20 bp, Artificial Sequence
  Synthetic
gctcatgtcagaatattgag

SEQ ID NO: 5183 - DNA, 20 bp, Artificial Sequence
  Synthetic
gaagtggaaggaggagcaga

SEQ ID NO: 5184 - DNA, 20 bp, Artificial Sequence
  Synthetic
gtcccacctgggtccttcag

SEQ ID NO: 5185 - DNA, 20 bp, Artificial Sequence
  Synthetic
gagcccggctttggaggatg

SEQ ID NO: 5186 - DNA, 20 bp, Artificial Sequence
  Synthetic
gacctgcctgctgatgggta

SEQ ID NO: 5187 - DNA, 20 bp, Artificial Sequence
  Synthetic
gtggactgtgctctggctcc

SEQ ID NO: 5188 - DNA, 20 bp, Artificial Sequence
  Synthetic
gtaagaagtaggaagaggag

SEQ ID NO: 5189 - DNA, 20 bp, Artificial Sequence
  Synthetic
gatttgcacgcattgtccct

SEQ ID NO: 5190 - DNA, 20 bp, Artificial Sequence
  Synthetic
ggatatgtgtgtgtgtgcgg

SEQ ID NO: 5191 - DNA, 20 bp, Artificial Sequence
  Synthetic
ggctgtcctccctggagact

SEQ ID NO: 5192 - DNA, 20 bp, Artificial Sequence
  Synthetic
ggcaaggctttaaagtcggc

SEQ ID NO: 5193 - DNA, 20 bp, Artificial Sequence
  Synthetic
gccctaagccttcagctctc

SEQ ID NO: 5194 - DNA, 20 bp, Artificial Sequence
  Synthetic
ggcatcacatcccaaagcag

SEQ ID NO: 5195 - DNA, 20 bp, Artificial Sequence
  Synthetic
gcaatcaggtctggcctctg

SEQ ID NO: 5196 - DNA, 20 bp, Artificial Sequence
  Synthetic
ggacaatcgcttgagaagcc

SEQ ID NO: 5197 - DNA, 20 bp, Artificial Sequence
  Synthetic
gttctgtgtgatcgtggctg

SEQ ID NO: 5198 - DNA, 20 bp, Artificial Sequence
  Synthetic
gtgtgcatacacactgtatg

SEQ ID NO: 5199 - DNA, 20 bp, Artificial Sequence
  Synthetic
ggattagctaggttagtgct

SEQ ID NO: 5200 - DNA, 20 bp, Artificial Sequence
  Synthetic
gtgcatacacactgtatgtg

SEQ ID NO: 5201 - DNA, 20 bp, Artificial Sequence
  Synthetic
gtgtctaggaggcacctgcc

SEQ ID NO: 5202 - DNA, 20 bp, Artificial Sequence
  Synthetic
ggtggtcataggaacaccaa

SEQ ID NO: 5203 - DNA, 20 bp, Artificial Sequence
  Synthetic
gactcagttccactctgcaa

SEQ ID NO: 5204 - DNA, 20 bp, Artificial Sequence
  Synthetic
gtgtcagtgacttaaataat

SEQ ID NO: 5205 - DNA, 20 bp, Artificial Sequence
  Synthetic
gcgttgtgtctctgtagcta

SEQ ID NO: 5206 - DNA, 20 bp, Artificial Sequence
  Synthetic
ggcaagtggtagatctggtt

SEQ ID NO: 5207 - DNA, 20 bp, Artificial Sequence
  Synthetic
gcaggaggcaccagccatga

SEQ ID NO: 5208 - DNA, 20 bp, Artificial Sequence
  Synthetic
gttgggagggtagagggcct

SEQ ID NO: 5209 - DNA, 20 bp, Artificial Sequence
  Synthetic
ggcccaagcagctgtgagct

SEQ ID NO: 5210 - DNA, 20 bp, Artificial Sequence
  Synthetic
ggttgaatgccatgacaact

SEQ ID NO: 5211 - DNA, 20 bp, Artificial Sequence
  Synthetic
gttctgcttcgcctggacta

SEQ ID NO: 5212 - DNA, 20 bp, Artificial Sequence
  Synthetic
ggtttccttaatattgtgga

SEQ ID NO: 5213 - DNA, 20 bp, Artificial Sequence
  Synthetic
gtcacaaggctctagaaacc

SEQ ID NO: 5214 - DNA, 20 bp, Artificial Sequence
  Synthetic
ggtgaagacccagaaatcca

SEQ ID NO: 5215 - DNA, 20 bp, Artificial Sequence
  Synthetic
gggcggtctagagaagggag

SEQ ID NO: 5216 - DNA, 20 bp, Artificial Sequence
  Synthetic
gctctagcagtggcagggtt

SEQ ID NO: 5217 - DNA, 20 bp, Artificial Sequence
  Synthetic
gagcactgcttggttggacc

SEQ ID NO: 5218 - DNA, 20 bp, Artificial Sequence
  Synthetic
ggttcacccagccagggttc

SEQ ID NO: 5219 - DNA, 20 bp, Artificial Sequence
  Synthetic
ggagaggagtgttgtatctg

SEQ ID NO: 5220 - DNA, 20 bp, Artificial Sequence
  Synthetic
gagccgaattgcctcttcta

SEQ ID NO: 5221 - DNA, 20 bp, Artificial Sequence
  Synthetic
gtttcagaaagttgaggcct

SEQ ID NO: 5222 - DNA, 20 bp, Artificial Sequence
  Synthetic
gcctgatggagaccaccttc

SEQ ID NO: 5223 - DNA, 20 bp, Artificial Sequence
  Synthetic
gggtgggtggaagtctccag

SEQ ID NO: 5224 - DNA, 20 bp, Artificial Sequence
  Synthetic
gcctggcctgagtcagtatt

SEQ ID NO: 5225 - DNA, 20 bp, Artificial Sequence
  Synthetic
gctgtctgctccctacctgc

SEQ ID NO: 5226 - DNA, 20 bp, Artificial Sequence
  Synthetic
gggtacccaacaaggatccc

SEQ ID NO: 5227 - DNA, 20 bp, Artificial Sequence
  Synthetic
ggaaagaaagaactgcgggt

SEQ ID NO: 5228 - DNA, 20 bp, Artificial Sequence
  Synthetic
gtgagcttgataatagactc

SEQ ID NO: 5229 - DNA, 20 bp, Artificial Sequence
  Synthetic
gtatggtgctcctactctca

SEQ ID NO: 5230 - DNA, 20 bp, Artificial Sequence
  Synthetic
ggacttgggacacttgagct

SEQ ID NO: 5231 - DNA, 20 bp, Artificial Sequence
  Synthetic
gtgaggagaggaaatgggaa

SEQ ID NO: 5232 - DNA, 20 bp, Artificial Sequence
  Synthetic
gtgttgtgaggagaggaaat

SEQ ID NO: 5233 - DNA, 20 bp, Artificial Sequence
  Synthetic
gcgaaggatggagctagaaa

SEQ ID NO: 5234 - DNA, 20 bp, Artificial Sequence
  Synthetic
gagtccaggttaaactttgg

SEQ ID NO: 5235 - DNA, 20 bp, Artificial Sequence
  Synthetic
gcaaagaatctgcctgttgt

SEQ ID NO: 5236 - DNA, 20 bp, Artificial Sequence
  Synthetic
gttatgctgagtctaaacgc

SEQ ID NO: 5237 - DNA, 20 bp, Artificial Sequence
  Synthetic
gggagtcctgttaagtgaat

SEQ ID NO: 5238 - DNA, 20 bp, Artificial Sequence
  Synthetic
gttgtgcctttcagagcaca

SEQ ID NO: 5239 - DNA, 20 bp, Artificial Sequence
  Synthetic
gggttctgagctgaatggaa

SEQ ID NO: 5240 - DNA, 20 bp, Artificial Sequence
  Synthetic
gatcgggctagaaagggtct

SEQ ID NO: 5241 - DNA, 20 bp, Artificial Sequence
  Synthetic
gctgagtctaaacgcagggt

SEQ ID NO: 5242 - DNA, 20 bp, Artificial Sequence
  Synthetic
gcggctgattgcaggaaagg

SEQ ID NO: 5243 - DNA, 20 bp, Artificial Sequence
  Synthetic
gattgaagattggtttgtgt

SEQ ID NO: 5244 - DNA, 20 bp, Artificial Sequence
  Synthetic
gttgaaagggacagagacaa

SEQ ID NO: 5245 - DNA, 20 bp, Artificial Sequence
  Synthetic
gatagtctcccactcctgca

SEQ ID NO: 5246 - DNA, 20 bp, Artificial Sequence
  Synthetic
gggtttggagggctagttag

SEQ ID NO: 5247 - DNA, 20 bp, Artificial Sequence
  Synthetic
gaaggctcagggttagcacg

SEQ ID NO: 5248 - DNA, 20 bp, Artificial Sequence
  Synthetic
gcttaagagcaaagacctgg

SEQ ID NO: 5249 - DNA, 20 bp, Artificial Sequence
  Synthetic
gaaagcagggagccagccag

SEQ ID NO: 5250 - DNA, 20 bp, Artificial Sequence
  Synthetic
gggttagcacgtggtttctg

SEQ ID NO: 5251 - DNA, 20 bp, Artificial Sequence
  Synthetic
gtgctatctagacctgggag

SEQ ID NO: 5252 - DNA, 20 bp, Artificial Sequence
  Synthetic
gagatcagtggaccacttga

SEQ ID NO: 5253 - DNA, 20 bp, Artificial Sequence
  Synthetic
gtacaacagagagctcccga

SEQ ID NO: 5254 - DNA, 20 bp, Artificial Sequence
  Synthetic
gtggtttctgtgggaaccaa

SEQ ID NO: 5255 - DNA, 20 bp, Artificial Sequence
  Synthetic
gggagagtgctgttcaaact

SEQ ID NO: 5256 - DNA, 20 bp, Artificial Sequence
  Synthetic
gggctcagttgggaggacca

SEQ ID NO: 5257 - DNA, 20 bp, Artificial Sequence
  Synthetic
gcaatgtacaagtcttcctt

SEQ ID NO: 5258 - DNA, 20 bp, Artificial Sequence
  Synthetic
ggaccctgagtctgggactc

SEQ ID NO: 5259 - DNA, 20 bp, Artificial Sequence
  Synthetic
gtcttgggagaaagcaggag

SEQ ID NO: 5260 - DNA, 20 bp, Artificial Sequence
  Synthetic
gtttgagcagggaaatgacc

SEQ ID NO: 5261 - DNA, 20 bp, Artificial Sequence
  Synthetic
ggcaccgacttgggagatga

SEQ ID NO: 5262 - DNA, 20 bp, Artificial Sequence
  Synthetic
gctgaattcgaacctgacaa

SEQ ID NO: 5263 - DNA, 20 bp, Artificial Sequence
  Synthetic
gagccagaggaagactagaa

SEQ ID NO: 5264 - DNA, 20 bp, Artificial Sequence
  Synthetic
gcaccgacttgggagatgaa

SEQ ID NO: 5265 - DNA, 20 bp, Artificial Sequence
  Synthetic
gccagaggcagaggatgcac

SEQ ID NO: 5266 - DNA, 20 bp, Artificial Sequence
  Synthetic
gggaaaccaggaaaggttaa

SEQ ID NO: 5267 - DNA, 20 bp, Artificial Sequence
  Synthetic
ggcatagccactgcaccact

SEQ ID NO: 5268 - DNA, 20 bp, Artificial Sequence
  Synthetic
ggaatcagaactgagcaggc

SEQ ID NO: 5269 - DNA, 20 bp, Artificial Sequence
  Synthetic
ggttaagggctcatcaggga

SEQ ID NO: 5270 - DNA, 20 bp, Artificial Sequence
  Synthetic
gcagttactcactgtttgga

SEQ ID NO: 5271 - DNA, 20 bp, Artificial Sequence
  Synthetic
gggctccaggtgaccctcaa

SEQ ID NO: 5272 - DNA, 20 bp, Artificial Sequence
  Synthetic
gttgtctagatgtgtccagc

SEQ ID NO: 5273 - DNA, 20 bp, Artificial Sequence
  Synthetic
ggtacagtgctatttcagtt

SEQ ID NO: 5274 - DNA, 20 bp, Artificial Sequence
  Synthetic
gctggagaaggaacagattg

SEQ ID NO: 5275 - DNA, 20 bp, Artificial Sequence
  Synthetic
gatgttaatttcagaagctg

SEQ ID NO: 5276 - DNA, 20 bp, Artificial Sequence
  Synthetic
gcgaggaattggaaagcatt

SEQ ID NO: 5277 - DNA, 20 bp, Artificial Sequence
  Synthetic
gtgaggaatgacactctgat

SEQ ID NO: 5278 - DNA, 20 bp, Artificial Sequence
  Synthetic
gtgagctctggacatgctga

SEQ ID NO: 5279 - DNA, 20 bp, Artificial Sequence
  Synthetic
gtgtgatggcctgtggacat

SEQ ID NO: 5280 - DNA, 20 bp, Artificial Sequence
  Synthetic
ggaccctgcagcatcttcat

SEQ ID NO: 5281 - DNA, 20 bp, Artificial Sequence
  Synthetic
gcgaggcggacgactttgac

SEQ ID NO: 5282 - DNA, 20 bp, Artificial Sequence
  Synthetic
ggaatgacactctgatggga

SEQ ID NO: 5283 - DNA, 20 bp, Artificial Sequence
  Synthetic
gtggattggctggttccaac

SEQ ID NO: 5284 - DNA, 20 bp, Artificial Sequence
  Synthetic
gcctgccagtctctaggctc

SEQ ID NO: 5285 - DNA, 20 bp, Artificial Sequence
  Synthetic
gtgataatgatctagggagt

SEQ ID NO: 5286 - DNA, 20 bp, Artificial Sequence
  Synthetic
ggtttgaaagcagcaaaccc

SEQ ID NO: 5287 - DNA, 20 bp, Artificial Sequence
  Synthetic
gagctaatggagcaggcagg

SEQ ID NO: 5288 - DNA, 20 bp, Artificial Sequence
  Synthetic
gcctctagccaggtgctgtc

SEQ ID NO: 5289 - DNA, 20 bp, Artificial Sequence
  Synthetic
gtgtcactgactgccctttc

SEQ ID NO: 5290 - DNA, 20 bp, Artificial Sequence
  Synthetic
gggtttaggtagcagagggc

SEQ ID NO: 5291 - DNA, 20 bp, Artificial Sequence
  Synthetic
ggtccagacaccgttggagg

SEQ ID NO: 5292 - DNA, 20 bp, Artificial Sequence
  Synthetic
gatcattatcacttatgagg

SEQ ID NO: 5293 - DNA, 20 bp, Artificial Sequence
  Synthetic
gggcagttgatacaccagtg

SEQ ID NO: 5294 - DNA, 20 bp, Artificial Sequence
  Synthetic
ggatgaatgaagcgggagtg

SEQ ID NO: 5295 - DNA, 20 bp, Artificial Sequence
  Synthetic
gagacagggtaggtgtgctc

SEQ ID NO: 5296 - DNA, 20 bp, Artificial Sequence
  Synthetic
gcttagttcagggaagagcc

SEQ ID NO: 5297 - DNA, 20 bp, Artificial Sequence
  Synthetic
gtgggctgttgtgaacttgt

SEQ ID NO: 5298 - DNA, 20 bp, Artificial Sequence
  Synthetic
gtgcctagtggtcctgtcct

SEQ ID NO: 5299 - DNA, 20 bp, Artificial Sequence
  Synthetic
ggcgaactatgagacagggt

SEQ ID NO: 5300 - DNA, 20 bp, Artificial Sequence
  Synthetic
gttcagggaagagcctggga

SEQ ID NO: 5301 - DNA, 20 bp, Artificial Sequence
  Synthetic
gggcgaatggaaatttgtta

SEQ ID NO: 5302 - DNA, 20 bp, Artificial Sequence
  Synthetic
gcatctccgtaggtgggctg

SEQ ID NO: 5303 - DNA, 20 bp, Artificial Sequence
  Synthetic
ggtcctggcgatttaagcag

SEQ ID NO: 5304 - DNA, 20 bp, Artificial Sequence
  Synthetic
gagcaatcactattctctgg

SEQ ID NO: 5305 - DNA, 20 bp, Artificial Sequence
  Synthetic
gaacagagctacacagaaag

SEQ ID NO: 5306 - DNA, 20 bp, Artificial Sequence
  Synthetic
ggcattccactgaagaatgg

SEQ ID NO: 5307 - DNA, 20 bp, Artificial Sequence
  Synthetic
gagacctaagcagggcagtc

SEQ ID NO: 5308 - DNA, 20 bp, Artificial Sequence
  Synthetic
gatgagccaagaagaagcga

SEQ ID NO: 5309 - DNA, 20 bp, Artificial Sequence
  Synthetic
gtccaccaatgcccagatcc

SEQ ID NO: 5310 - DNA, 20 bp, Artificial Sequence
  Synthetic
ggctcatctttgggagttcg

SEQ ID NO: 5311 - DNA, 20 bp, Artificial Sequence
  Synthetic
gcgtcacattcattccgaca

SEQ ID NO: 5312 - DNA, 20 bp, Artificial Sequence
  Synthetic
gtagggactggaggctcctg

SEQ ID NO: 5313 - DNA, 20 bp, Artificial Sequence
  Synthetic
gagagacttctgacaggagt

SEQ ID NO: 5314 - DNA, 20 bp, Artificial Sequence
  Synthetic
gggtcagcacttctaagaag

SEQ ID NO: 5315 - DNA, 20 bp, Artificial Sequence
  Synthetic
gacttccaataagctgctgt

SEQ ID NO: 5316 - DNA, 20 bp, Artificial Sequence
  Synthetic
gtttagtctcctccaggcct

SEQ ID NO: 5317 - DNA, 20 bp, Artificial Sequence
  Synthetic
gcttcccaaggaaggccttg

SEQ ID NO: 5318 - DNA, 20 bp, Artificial Sequence
  Synthetic
gcctgcttgatggaaaggta

SEQ ID NO: 5319 - DNA, 20 bp, Artificial Sequence
  Synthetic
ggagcagaacagcaatggaa

SEQ ID NO: 5320 - DNA, 20 bp, Artificial Sequence
  Synthetic
gctcatattcaagggtcaag

SEQ ID NO: 5321 - DNA, 20 bp, Artificial Sequence
  Synthetic
gcatggtgctcttgctggtg

SEQ ID NO: 5322 - DNA, 20 bp, Artificial Sequence
  Synthetic
gctggagagtcaagtcaagc

SEQ ID NO: 5323 - DNA, 20 bp, Artificial Sequence
  Synthetic
ggttggaactgtgagggcgg

SEQ ID NO: 5324 - DNA, 20 bp, Artificial Sequence
  Synthetic
ggagccatatgagctgggca

SEQ ID NO: 5325 - DNA, 20 bp, Artificial Sequence
  Synthetic
ggaggcgtccatcaggttag

SEQ ID NO: 5326 - DNA, 20 bp, Artificial Sequence
  Synthetic
gctgattcttgaccctctcc

SEQ ID NO: 5327 - DNA, 20 bp, Artificial Sequence
  Synthetic
gcaaagtttaggcagaggta

SEQ ID NO: 5328 - DNA, 20 bp, Artificial Sequence
  Synthetic
gtgccatcttggagtattag

SEQ ID NO: 5329 - DNA, 20 bp, Artificial Sequence
  Synthetic
gactaagctttgcctaaagg

SEQ ID NO: 5330 - DNA, 20 bp, Artificial Sequence
  Synthetic
gggaagaaaggtgtaattta

SEQ ID NO: 5331 - DNA, 20 bp, Artificial Sequence
  Synthetic
gctggcagagcttcctgatg

SEQ ID NO: 5332 - DNA, 20 bp, Artificial Sequence
  Synthetic
gaggcatagagacaagacct

SEQ ID NO: 5333 - DNA, 20 bp, Artificial Sequence
  Synthetic
gtgaggatgctcctacactc

SEQ ID NO: 5334 - DNA, 20 bp, Artificial Sequence
  Synthetic
ggcatcctggaattctcact

SEQ ID NO: 5335 - DNA, 20 bp, Artificial Sequence
  Synthetic
gttacagaaccttccaacat

SEQ ID NO: 5336 - DNA, 20 bp, Artificial Sequence
  Synthetic
gcgatcgtggtgggactcca

SEQ ID NO: 5337 - DNA, 20 bp, Artificial Sequence
  Synthetic
gtgtgctcacacgcattcca

SEQ ID NO: 5338 - DNA, 20 bp, Artificial Sequence
  Synthetic
gggaactatccagcaggcag

SEQ ID NO: 5339 - DNA, 20 bp, Artificial Sequence
  Synthetic
gtgacagttaaagctgcgca

SEQ ID NO: 5340 - DNA, 20 bp, Artificial Sequence
  Synthetic
gtgtttcttctcacccagga

SEQ ID NO: 5341 - DNA, 20 bp, Artificial Sequence
  Synthetic
gaggtgagtcctgcgcactc

SEQ ID NO: 5342 - DNA, 20 bp, Artificial Sequence
  Synthetic
gatctctggacgccagtaga

SEQ ID NO: 5343 - DNA, 20 bp, Artificial Sequence
  Synthetic
ggcagggtttgtaggatgct

SEQ ID NO: 5344 - DNA, 20 bp, Artificial Sequence
  Synthetic
gtcctggctcatggtgttct

SEQ ID NO: 5345 - DNA, 20 bp, Artificial Sequence
  Synthetic
ggctagaccagccggaagag

SEQ ID NO: 5346 - DNA, 20 bp, Artificial Sequence
  Synthetic
ggtgcaggtccagtttgcac

SEQ ID NO: 5347 - DNA, 20 bp, Artificial Sequence
  Synthetic
gataggtagccaggagccaa

SEQ ID NO: 5348 - DNA, 20 bp, Artificial Sequence
  Synthetic
gtcagaaacaagcctgagga

SEQ ID NO: 5349 - DNA, 20 bp, Artificial Sequence
  Synthetic
gtgagagtgaacgctgttcg

SEQ ID NO: 5350 - DNA, 20 bp, Artificial Sequence
  Synthetic
gagcatttctacctgggtta

SEQ ID NO: 5351 - DNA, 20 bp, Artificial Sequence
  Synthetic
gcagtcacagggagactggg

SEQ ID NO: 5352 - DNA, 20 bp, Artificial Sequence
  Synthetic
gaaagattgcatggcactac

SEQ ID NO: 5353 - DNA, 20 bp, Artificial Sequence
  Synthetic
ggagaacttgatagttatct

SEQ ID NO: 5354 - DNA, 20 bp, Artificial Sequence
  Synthetic
gtgagcggaagagttggtct

SEQ ID NO: 5355 - DNA, 20 bp, Artificial Sequence
  Synthetic
gggtttcactgagctagggt

SEQ ID NO: 5356 - DNA, 20 bp, Artificial Sequence
  Synthetic
gcctgcacagagcaaagggc

SEQ ID NO: 5357 - DNA, 20 bp, Artificial Sequence
  Synthetic
gacgcctgcctttcattagg

SEQ ID NO: 5358 - DNA, 20 bp, Artificial Sequence
  Synthetic
gtttccagaatcatcagggt

SEQ ID NO: 5359 - DNA, 20 bp, Artificial Sequence
  Synthetic
gaaataaccaccatccgggc

SEQ ID NO: 5360 - DNA, 20 bp, Artificial Sequence
  Synthetic
gatgctggatcgaggagctg

SEQ ID NO: 5361 - DNA, 20 bp, Artificial Sequence
  Synthetic
gttactatcctatgatggtt

SEQ ID NO: 5362 - DNA, 20 bp, Artificial Sequence
  Synthetic
gaggtcagagtctaagttaa

SEQ ID NO: 5363 - DNA, 20 bp, Artificial Sequence
  Synthetic
gaccttaaggtgcaggactt

SEQ ID NO: 5364 - DNA, 20 bp, Artificial Sequence
  Synthetic
gggacactatcaggaataaa

SEQ ID NO: 5365 - DNA, 20 bp, Artificial Sequence
  Synthetic
gaacactgagccaatgggta

SEQ ID NO: 5366 - DNA, 20 bp, Artificial Sequence
  Synthetic
ggtgacgaaggccagcaatt

SEQ ID NO: 5367 - DNA, 20 bp, Artificial Sequence
  Synthetic
ggaacactgagccaatgggt

SEQ ID NO: 5368 - DNA, 20 bp, Artificial Sequence
  Synthetic
gtggagtgaagaaggaaagg

SEQ ID NO: 5369 - DNA, 20 bp, Artificial Sequence
  Synthetic
ggatgctggatcgaggagct

SEQ ID NO: 5370 - DNA, 20 bp, Artificial Sequence
  Synthetic
gagacaaatgtccaggacag

SEQ ID NO: 5371 - DNA, 20 bp, Artificial Sequence
  Synthetic
gagagaacaaacagagctca

SEQ ID NO: 5372 - DNA, 20 bp, Artificial Sequence
  Synthetic
gcgataagccacttccaggc

SEQ ID NO: 5373 - DNA, 20 bp, Artificial Sequence
  Synthetic
gttctacccatactgtaggt

SEQ ID NO: 5374 - DNA, 20 bp, Artificial Sequence
  Synthetic
gaaccctggtcttatgtgca

SEQ ID NO: 5375 - DNA, 20 bp, Artificial Sequence
  Synthetic
gtctctagtggtcagaggta

SEQ ID NO: 5376 - DNA, 20 bp, Artificial Sequence
  Synthetic
ggttctacccatactgtagg

SEQ ID NO: 5377 - DNA, 20 bp, Artificial Sequence
  Synthetic
gtgactgctcctttccatca

SEQ ID NO: 5378 - DNA, 20 bp, Artificial Sequence
  Synthetic
gtatggcccacctacagtat

SEQ ID NO: 5379 - DNA, 20 bp, Artificial Sequence
  Synthetic
gagactgtaaggtcttcctg

SEQ ID NO: 5380 - DNA, 20 bp, Artificial Sequence
  Synthetic
gggtaggactggcatagcac

SEQ ID NO: 5381 - DNA, 20 bp, Artificial Sequence
  Synthetic
gcaagggcatgtgaattcct

SEQ ID NO: 5382 - DNA, 20 bp, Artificial Sequence
  Synthetic
gggaggagctaagacaaaca

SEQ ID NO: 5383 - DNA, 20 bp, Artificial Sequence
  Synthetic
gaggtagtactgggactagg

SEQ ID NO: 5384 - DNA, 20 bp, Artificial Sequence
  Synthetic
gtgagaaacacagaggcctg

SEQ ID NO: 5385 - DNA, 20 bp, Artificial Sequence
  Synthetic
gttggctgggaggagggaga

SEQ ID NO: 5386 - DNA, 20 bp, Artificial Sequence
  Synthetic
gctcctcccagttcctccca

SEQ ID NO: 5387 - DNA, 20 bp, Artificial Sequence
  Synthetic
gatctcaacgtgccggctgc

SEQ ID NO: 5388 - DNA, 20 bp, Artificial Sequence
  Synthetic
gctgggaggaagggaaggag

SEQ ID NO: 5389 - DNA, 20 bp, Artificial Sequence
  Synthetic
ggcaagggcatgtgaattcc

SEQ ID NO: 5390 - DNA, 20 bp, Artificial Sequence
  Synthetic
gctcagagtcctggaaagct

SEQ ID NO: 5391 - DNA, 20 bp, Artificial Sequence
  Synthetic
gcagtaaccatgtgggacca

SEQ ID NO: 5392 - DNA, 20 bp, Artificial Sequence
  Synthetic
ggagcctgtatagaggaagt

SEQ ID NO: 5393 - DNA, 20 bp, Artificial Sequence
  Synthetic
gaggtcaggaccgctcgttg

SEQ ID NO: 5394 - DNA, 20 bp, Artificial Sequence
  Synthetic
gggataagcggctgcgagac

SEQ ID NO: 5395 - DNA, 20 bp, Artificial Sequence
  Synthetic
ggtccacggattggaagaag

SEQ ID NO: 5396 - DNA, 20 bp, Artificial Sequence
  Synthetic
gcgagacaggctgggaagga

SEQ ID NO: 5397 - DNA, 20 bp, Artificial Sequence
  Synthetic
gagcaaacaacctctagcag

SEQ ID NO: 5398 - DNA, 20 bp, Artificial Sequence
  Synthetic
gtcacctccatggtcccaca

SEQ ID NO: 5399 - DNA, 20 bp, Artificial Sequence
  Synthetic
gattcccaactgtccataag

SEQ ID NO: 5400 - DNA, 20 bp, Artificial Sequence
  Synthetic
gctgcgaggaaagtgaggga

SEQ ID NO: 5401 - DNA, 20 bp, Artificial Sequence
  Synthetic
gacagacttccggtctgcca

SEQ ID NO: 5402 - DNA, 20 bp, Artificial Sequence
  Synthetic
ggagatggcaagatggttac

SEQ ID NO: 5403 - DNA, 20 bp, Artificial Sequence
  Synthetic
gaggttatctgaggttggac

SEQ ID NO: 5404 - DNA, 20 bp, Artificial Sequence
  Synthetic
gagatgctggccctggaagc

SEQ ID NO: 5405 - DNA, 20 bp, Artificial Sequence
  Synthetic
gcgtcacttccggaagtagg

SEQ ID NO: 5406 - DNA, 20 bp, Artificial Sequence
  Synthetic
gagagctgcgaggaaagtga

SEQ ID NO: 5407 - DNA, 20 bp, Artificial Sequence
  Synthetic
ggaagtaacttcagaagcct

SEQ ID NO: 5408 - DNA, 20 bp, Artificial Sequence
  Synthetic
gagggagcgccaagagtaaa

SEQ ID NO: 5409 - DNA, 20 bp, Artificial Sequence
  Synthetic
gggtgaagacaggcaggtgc

SEQ ID NO: 5410 - DNA, 20 bp, Artificial Sequence
  Synthetic
gggaagggtgaacatggttg

SEQ ID NO: 5411 - DNA, 20 bp, Artificial Sequence
  Synthetic
gagcctgtgagcaggaaact

SEQ ID NO: 5412 - DNA, 20 bp, Artificial Sequence
  Synthetic
gactgggaacacgtgcaaga

SEQ ID NO: 5413 - DNA, 20 bp, Artificial Sequence
  Synthetic
gaggctgctgggattagggt

SEQ ID NO: 5414 - DNA, 20 bp, Artificial Sequence
  Synthetic
gaagagattagggagtcagg

SEQ ID NO: 5415 - DNA, 20 bp, Artificial Sequence
  Synthetic
gaggcagaagctgaagatgg

SEQ ID NO: 5416 - DNA, 20 bp, Artificial Sequence
  Synthetic
gacagtgctgcctcttctac

SEQ ID NO: 5417 - DNA, 20 bp, Artificial Sequence
  Synthetic
gaggtgtctttgggaggagg

SEQ ID NO: 5418 - DNA, 20 bp, Artificial Sequence
  Synthetic
ggaggagaaagaaatgtatt

SEQ ID NO: 5419 - DNA, 20 bp, Artificial Sequence
  Synthetic
gggattctccaaactgcttc

SEQ ID NO: 5420 - DNA, 20 bp, Artificial Sequence
  Synthetic
gatacatgtagaggagctga

SEQ ID NO: 5421 - DNA, 20 bp, Artificial Sequence
  Synthetic
ggatgtcagcaaattatggc

SEQ ID NO: 5422 - DNA, 20 bp, Artificial Sequence
  Synthetic
ggaataattccaaccatcac

SEQ ID NO: 5423 - DNA, 20 bp, Artificial Sequence
  Synthetic
ggatctttacctttgtaact

SEQ ID NO: 5424 - DNA, 20 bp, Artificial Sequence
  Synthetic
gctggaggtcaaatgccaca

SEQ ID NO: 5425 - DNA, 20 bp, Artificial Sequence
  Synthetic
gatcaaggtgtttacaaagg

SEQ ID NO: 5426 - DNA, 20 bp, Artificial Sequence
  Synthetic
gttcttaggagattagaggg

SEQ ID NO: 5427 - DNA, 20 bp, Artificial Sequence
  Synthetic
gtcccagcacctatgttaat

SEQ ID NO: 5428 - DNA, 20 bp, Artificial Sequence
  Synthetic
gatcattgctggcaaggcaa

SEQ ID NO: 5429 - DNA, 20 bp, Artificial Sequence
  Synthetic
gaactcctcacttaccctta

SEQ ID NO: 5430 - DNA, 20 bp, Artificial Sequence
  Synthetic
gatcttgctgctgcgtgtct

SEQ ID NO: 5431 - DNA, 20 bp, Artificial Sequence
  Synthetic
gagagctgtacagaaagaac

SEQ ID NO: 5432 - DNA, 20 bp, Artificial Sequence
  Synthetic
gagctgtacagaaagaacag

SEQ ID NO: 5433 - DNA, 20 bp, Artificial Sequence
  Synthetic
gcactgctctgcagagtgtc

SEQ ID NO: 5434 - DNA, 20 bp, Artificial Sequence
  Synthetic
gatgaaatcaaacggacagg

SEQ ID NO: 5435 - DNA, 20 bp, Artificial Sequence
  Synthetic
gtcacatcttctctgacgga

SEQ ID NO: 5436 - DNA, 20 bp, Artificial Sequence
  Synthetic
ggaggaaatagcttcgagac

SEQ ID NO: 5437 - DNA, 20 bp, Artificial Sequence
  Synthetic
gaagagcatttctctccttt

SEQ ID NO: 5438 - DNA, 20 bp, Artificial Sequence
  Synthetic
gagtcactcccacgcatggc

SEQ ID NO: 5439 - DNA, 20 bp, Artificial Sequence
  Synthetic
ggacaagacgggctccattg

SEQ ID NO: 5440 - DNA, 20 bp, Artificial Sequence
  Synthetic
gggacacttatttccacgag

SEQ ID NO: 5441 - DNA, 20 bp, Artificial Sequence
  Synthetic
gagtgactcaggtcctctct

SEQ ID NO: 5442 - DNA, 20 bp, Artificial Sequence
  Synthetic
gccagagaaccagagagaat

SEQ ID NO: 5443 - DNA, 20 bp, Artificial Sequence
  Synthetic
gggaaattgaacaaaccaga

SEQ ID NO: 5444 - DNA, 20 bp, Artificial Sequence
  Synthetic
gctagctcgggtgctggact

SEQ ID NO: 5445 - DNA, 20 bp, Artificial Sequence
  Synthetic
ggagtgactcaggtcctctc

SEQ ID NO: 5446 - DNA, 20 bp, Artificial Sequence
  Synthetic
gtgttggttggtggcagatg

SEQ ID NO: 5447 - DNA, 20 bp, Artificial Sequence
  Synthetic
gtgcctgctgaggtcagaag

SEQ ID NO: 5448 - DNA, 20 bp, Artificial Sequence
  Synthetic
gtagcattgggcaagctatg

SEQ ID NO: 5449 - DNA, 20 bp, Artificial Sequence
  Synthetic
gtatcagggttggagcctgg

SEQ ID NO: 5450 - DNA, 20 bp, Artificial Sequence
  Synthetic
gacctcagcaggcacaaata

SEQ ID NO: 5451 - DNA, 20 bp, Artificial Sequence
  Synthetic
gcatggatcctgaataagcc

SEQ ID NO: 5452 - DNA, 20 bp, Artificial Sequence
  Synthetic
ggatcccactttcttacgtg

SEQ ID NO: 5453 - DNA, 20 bp, Artificial Sequence
  Synthetic
gccaccaaccaacacttctc

SEQ ID NO: 5454 - DNA, 20 bp, Artificial Sequence
  Synthetic
gggatcccactttcttacgt

SEQ ID NO: 5455 - DNA, 20 bp, Artificial Sequence
  Synthetic
gcaggaactgttaactatct

SEQ ID NO: 5456 - DNA, 20 bp, Artificial Sequence
  Synthetic
ggagtctgtgtaggataaca

SEQ ID NO: 5457 - DNA, 20 bp, Artificial Sequence
  Synthetic
gacaccagagttgcaggtat

SEQ ID NO: 5458 - DNA, 20 bp, Artificial Sequence
  Synthetic
gtacccttctccctcgaatc

SEQ ID NO: 5459 - DNA, 20 bp, Artificial Sequence
  Synthetic
gccagtgaggttcatctaaa

SEQ ID NO: 5460 - DNA, 20 bp, Artificial Sequence
  Synthetic
gcagaatcctgagccggagg

SEQ ID NO: 5461 - DNA, 20 bp, Artificial Sequence
  Synthetic
gtgcccaagacggcagagaa

SEQ ID NO: 5462 - DNA, 20 bp, Artificial Sequence
  Synthetic
gacttaagtccatgaactgg

SEQ ID NO: 5463 - DNA, 20 bp, Artificial Sequence
  Synthetic
gaaactctgactcagcctca

SEQ ID NO: 5464 - DNA, 20 bp, Artificial Sequence
  Synthetic
gctggagagagcagaggcga

SEQ ID NO: 5465 - DNA, 20 bp, Artificial Sequence
  Synthetic
ggatatcaccttactttgga

SEQ ID NO: 5466 - DNA, 20 bp, Artificial Sequence
  Synthetic
ggacacctcaggagagttta

SEQ ID NO: 5467 - DNA, 20 bp, Artificial Sequence
  Synthetic
gttcaccggtgaagttagcc

SEQ ID NO: 5468 - DNA, 20 bp, Artificial Sequence
  Synthetic
ggccgtggccctcctataag

SEQ ID NO: 5469 - DNA, 20 bp, Artificial Sequence
  Synthetic
ggcgggcttgctcttacctc

SEQ ID NO: 5470 - DNA, 20 bp, Artificial Sequence
  Synthetic
gcttgctcttacctcagggt

SEQ ID NO: 5471 - DNA, 20 bp, Artificial Sequence
  Synthetic
gcatgttactgagctctccc

SEQ ID NO: 5472 - DNA, 20 bp, Artificial Sequence
  Synthetic
gagctcccggtaccttcctt

SEQ ID NO: 5473 - DNA, 20 bp, Artificial Sequence
  Synthetic
gaaagctaccatccatccca

SEQ ID NO: 5474 - DNA, 20 bp, Artificial Sequence
  Synthetic
ggtaccttccttgggatgga

SEQ ID NO: 5475 - DNA, 20 bp, Artificial Sequence
  Synthetic
gtgggaaagaaagaagtcct

SEQ ID NO: 5476 - DNA, 20 bp, Artificial Sequence
  Synthetic
gacgagttgagagtgaatac

SEQ ID NO: 5477 - DNA, 20 bp, Artificial Sequence
  Synthetic
gtacacgcaatggaggcgag

SEQ ID NO: 5478 - DNA, 20 bp, Artificial Sequence
  Synthetic
gggaggagatgggaagaggg

SEQ ID NO: 5479 - DNA, 20 bp, Artificial Sequence
  Synthetic
gttctctcggtgtggagtgg

SEQ ID NO: 5480 - DNA, 20 bp, Artificial Sequence
  Synthetic
gagtcagcaggcactgcagg

SEQ ID NO: 5481 - DNA, 20 bp, Artificial Sequence
  Synthetic
gacccggtccttggatctgc

SEQ ID NO: 5482 - DNA, 20 bp, Artificial Sequence
  Synthetic
ggtctgacgtcagccatgtg

SEQ ID NO: 5483 - DNA, 20 bp, Artificial Sequence
  Synthetic
gtttgagctgtgccgcgagc

SEQ ID NO: 5484 - DNA, 20 bp, Artificial Sequence
  Synthetic
gcaaagatgtgggcaagtgg

SEQ ID NO: 5485 - DNA, 20 bp, Artificial Sequence
  Synthetic
gaggacactgagggtcttga

SEQ ID NO: 5486 - DNA, 20 bp, Artificial Sequence
  Synthetic
gcagagggtattgggcaggc

SEQ ID NO: 5487 - DNA, 20 bp, Artificial Sequence
  Synthetic
gagggtcttgaaggatggtc

SEQ ID NO: 5488 - DNA, 20 bp, Artificial Sequence
  Synthetic
gcctgcccaataccctctgc

SEQ ID NO: 5489 - DNA, 20 bp, Artificial Sequence
  Synthetic
gcagccaagtcagggcttca

SEQ ID NO: 5490 - DNA, 20 bp, Artificial Sequence
  Synthetic
gccagatgaaggcaggacct

SEQ ID NO: 5491 - DNA, 20 bp, Artificial Sequence
  Synthetic
gagggttaagcccacttagg

SEQ ID NO: 5492 - DNA, 20 bp, Artificial Sequence
  Synthetic
gaggaagagagactagggta

SEQ ID NO: 5493 - DNA, 20 bp, Artificial Sequence
  Synthetic
gtcgagagccaccaggttag

SEQ ID NO: 5494 - DNA, 20 bp, Artificial Sequence
  Synthetic
gcaaacaagtagagtgggta

SEQ ID NO: 5495 - DNA, 20 bp, Artificial Sequence
  Synthetic
ggagccaagagaagggctgc

SEQ ID NO: 5496 - DNA, 20 bp, Artificial Sequence
  Synthetic
gtttggagtttgagcatcct

SEQ ID NO: 5497 - DNA, 20 bp, Artificial Sequence
  Synthetic
ggaggagaagagaaagtgag

SEQ ID NO: 5498 - DNA, 20 bp, Artificial Sequence
  Synthetic
gtaactcctcatattgttgt

SEQ ID NO: 5499 - DNA, 20 bp, Artificial Sequence
  Synthetic
gtacgcagatgatggagagg

SEQ ID NO: 5500 - DNA, 20 bp, Artificial Sequence
  Synthetic
gatgatggagaggcgggaca

SEQ ID NO: 5501 - DNA, 20 bp, Artificial Sequence
  Synthetic
gtgtcaaggagccaagagaa

SEQ ID NO: 5502 - DNA, 20 bp, Artificial Sequence
  Synthetic
gcgctgccttcctgaatggc

SEQ ID NO: 5503 - DNA, 20 bp, Artificial Sequence
  Synthetic
gaaatggcacaggcggcagc

SEQ ID NO: 5504 - DNA, 20 bp, Artificial Sequence
  Synthetic
gtctcatcagttacaaagag

SEQ ID NO: 5505 - DNA, 20 bp, Artificial Sequence
  Synthetic
gatgagttgccaggtctaat

SEQ ID NO: 5506 - DNA, 20 bp, Artificial Sequence
  Synthetic
gacagagtgtgagacaagga

SEQ ID NO: 5507 - DNA, 20 bp, Artificial Sequence
  Synthetic
gatgcagagtaggacactgc

SEQ ID NO: 5508 - DNA, 20 bp, Artificial Sequence
  Synthetic
gccatcgaaatcaggaggac

SEQ ID NO: 5509 - DNA, 20 bp, Artificial Sequence
  Synthetic
gtattattgccatttggagc

SEQ ID NO: 5510 - DNA, 20 bp, Artificial Sequence
  Synthetic
gctctggtctttgtcttaga

SEQ ID NO: 5511 - DNA, 20 bp, Artificial Sequence
  Synthetic
ggcttcaagacagaagtagg

SEQ ID NO: 5512 - DNA, 20 bp, Artificial Sequence
  Synthetic
gaattctcacaatcaactag

SEQ ID NO: 5513 - DNA, 20 bp, Artificial Sequence
  Synthetic
gtgggttctacataatgcgc

SEQ ID NO: 5514 - DNA, 20 bp, Artificial Sequence
  Synthetic
ggttgggtcccaaaggttag

SEQ ID NO: 5515 - DNA, 20 bp, Artificial Sequence
  Synthetic
gacatttgaccttgtggttg

SEQ ID NO: 5516 - DNA, 20 bp, Artificial Sequence
  Synthetic
gcttgctccagtagaattgg

SEQ ID NO: 5517 - DNA, 20 bp, Artificial Sequence
  Synthetic
gcttgcctgaattcgattct

SEQ ID NO: 5518 - DNA, 20 bp, Artificial Sequence
  Synthetic
gtatccaggtggattcttct

SEQ ID NO: 5519 - DNA, 20 bp, Artificial Sequence
  Synthetic
gattctgggcactgcatgat

SEQ ID NO: 5520 - DNA, 20 bp, Artificial Sequence
  Synthetic
gaagaaaggctctggaagag

SEQ ID NO: 5521 - DNA, 20 bp, Artificial Sequence
  Synthetic
ggccagagagagggcttagg

SEQ ID NO: 5522 - DNA, 20 bp, Artificial Sequence
  Synthetic
gtcactgctctttaccaaga

SEQ ID NO: 5523 - DNA, 20 bp, Artificial Sequence
  Synthetic
gactcttctgctcagtttgc

SEQ ID NO: 5524 - DNA, 20 bp, Artificial Sequence
  Synthetic
ggtgttatggtgttgctttg

SEQ ID NO: 5525 - DNA, 20 bp, Artificial Sequence
  Synthetic
gtccctggaactcagaaaga

SEQ ID NO: 5526 - DNA, 20 bp, Artificial Sequence
  Synthetic
gtgattaaggaagccttgcg

SEQ ID NO: 5527 - DNA, 20 bp, Artificial Sequence
  Synthetic
gctcttcataactcctctcc

SEQ ID NO: 5528 - DNA, 20 bp, Artificial Sequence
  Synthetic
gatcccataatttacatgaa

SEQ ID NO: 5529 - DNA, 20 bp, Artificial Sequence
  Synthetic
gaggaaggtggagagagggc

SEQ ID NO: 5530 - DNA, 20 bp, Artificial Sequence
  Synthetic
gtgttgttatggtttcaggc

SEQ ID NO: 5531 - DNA, 20 bp, Artificial Sequence
  Synthetic
gccacctaggagaagaagtg

SEQ ID NO: 5532 - DNA, 20 bp, Artificial Sequence
  Synthetic
gctaacgtgtagtctcgttg

SEQ ID NO: 5533 - DNA, 20 bp, Artificial Sequence
  Synthetic
gaccttaccctagggtacac

SEQ ID NO: 5534 - DNA, 20 bp, Artificial Sequence
  Synthetic
gggttcatgctccacattgg

SEQ ID NO: 5535 - DNA, 20 bp, Artificial Sequence
  Synthetic
ggcctgcaaggatgaagtgt

SEQ ID NO: 5536 - DNA, 20 bp, Artificial Sequence
  Synthetic
gagagggagctgttggcacc

SEQ ID NO: 5537 - DNA, 20 bp, Artificial Sequence
  Synthetic
gtggcttccatatttaaaca

SEQ ID NO: 5538 - DNA, 20 bp, Artificial Sequence
  Synthetic
gagtcctgggctagtgttgt

SEQ ID NO: 5539 - DNA, 20 bp, Artificial Sequence
  Synthetic
gcagcagaaatcgggaacca

SEQ ID NO: 5540 - DNA, 20 bp, Artificial Sequence
  Synthetic
gtgcaggtcctgtcttcacc

SEQ ID NO: 5541 - DNA, 20 bp, Artificial Sequence
  Synthetic
gactgtctgaagatagctgc

SEQ ID NO: 5542 - DNA, 20 bp, Artificial Sequence
  Synthetic
gttccaggagagcgggtatc

SEQ ID NO: 5543 - DNA, 20 bp, Artificial Sequence
  Synthetic
ggccacaaagatgtaaagaa

SEQ ID NO: 5544 - DNA, 20 bp, Artificial Sequence
  Synthetic
gagccaaatgcctcaggcat

SEQ ID NO: 5545 - DNA, 20 bp, Artificial Sequence
  Synthetic
gtcaaggctgccatctaaag

SEQ ID NO: 5546 - DNA, 20 bp, Artificial Sequence
  Synthetic
gtgtgaggacgcaaggtctg

SEQ ID NO: 5547 - DNA, 20 bp, Artificial Sequence
  Synthetic
gacctctcatccttcgaagc

SEQ ID NO: 5548 - DNA, 20 bp, Artificial Sequence
  Synthetic
gtcctttctttacatctttg

SEQ ID NO: 5549 - DNA, 20 bp, Artificial Sequence
  Synthetic
gttcctatgcctgaggcatt

SEQ ID NO: 5550 - DNA, 20 bp, Artificial Sequence
  Synthetic
gtgaaagggactgaagggct

SEQ ID NO: 5551 - DNA, 20 bp, Artificial Sequence
  Synthetic
gcaggcgatgtttctaaatt

SEQ ID NO: 5552 - DNA, 20 bp, Artificial Sequence
  Synthetic
gattgaaggaggatcttctc

SEQ ID NO: 5553 - DNA, 20 bp, Artificial Sequence
  Synthetic
gttcgaccctgtctgatgcc

SEQ ID NO: 5554 - DNA, 20 bp, Artificial Sequence
  Synthetic
ggcgatgtttctaaattggg

SEQ ID NO: 5555 - DNA, 20 bp, Artificial Sequence
  Synthetic
gattagcagcctgcacaaac

SEQ ID NO: 5556 - DNA, 20 bp, Artificial Sequence
  Synthetic
gaggctgagagtgtaggagg

SEQ ID NO: 5557 - DNA, 20 bp, Artificial Sequence
  Synthetic
gataatgccacttatgtgtg

SEQ ID NO: 5558 - DNA, 20 bp, Artificial Sequence
  Synthetic
ggagacatgacatctttcca

SEQ ID NO: 5559 - DNA, 20 bp, Artificial Sequence
  Synthetic
gcgcaagataccctccaggt

SEQ ID NO: 5560 - DNA, 20 bp, Artificial Sequence
  Synthetic
ggtgcttcacttcttcttgg

SEQ ID NO: 5561 - DNA, 20 bp, Artificial Sequence
  Synthetic
gatatggtccattggtagct

SEQ ID NO: 5562 - DNA, 20 bp, Artificial Sequence
  Synthetic
gcttgtcccagatctgagtg

SEQ ID NO: 5563 - DNA, 20 bp, Artificial Sequence
  Synthetic
gttggtgtttctcttcattt

SEQ ID NO: 5564 - DNA, 20 bp, Artificial Sequence
  Synthetic
ggcagcggcttgttagcgac

SEQ ID NO: 5565 - DNA, 20 bp, Artificial Sequence
  Synthetic
gaggctggccattagaggcc

SEQ ID NO: 5566 - DNA, 20 bp, Artificial Sequence
  Synthetic
gggcatgagtccacaaagta

SEQ ID NO: 5567 - DNA, 20 bp, Artificial Sequence
  Synthetic
gcccttcatccatctaccca

SEQ ID NO: 5568 - DNA, 20 bp, Artificial Sequence
  Synthetic
ggtgtggcttcagggacttc

SEQ ID NO: 5569 - DNA, 20 bp, Artificial Sequence
  Synthetic
gttcctcaacactctggctt

SEQ ID NO: 5570 - DNA, 20 bp, Artificial Sequence
  Synthetic
ggcacctaaacctcagggat

SEQ ID NO: 5571 - DNA, 20 bp, Artificial Sequence
  Synthetic
ggtatcggtggtcctagcct

SEQ ID NO: 5572 - DNA, 20 bp, Artificial Sequence
  Synthetic
gctaagacttcttctgtgtg

SEQ ID NO: 5573 - DNA, 20 bp, Artificial Sequence
  Synthetic
gaagaaagctcactgatagg

SEQ ID NO: 5574 - DNA, 20 bp, Artificial Sequence
  Synthetic
gtatcggtggtcctagccta

SEQ ID NO: 5575 - DNA, 20 bp, Artificial Sequence
  Synthetic
gtagtgacagccctgagcat

SEQ ID NO: 5576 - DNA, 20 bp, Artificial Sequence
  Synthetic
gtgagctgtaaagagaacct

SEQ ID NO: 5577 - DNA, 20 bp, Artificial Sequence
  Synthetic
gctccttagtttgaggaaga

SEQ ID NO: 5578 - DNA, 20 bp, Artificial Sequence
  Synthetic
gagtcactgagttcagaaga

SEQ ID NO: 5579 - DNA, 20 bp, Artificial Sequence
  Synthetic
gggatgatcttaagctggga

SEQ ID NO: 5580 - DNA, 20 bp, Artificial Sequence
  Synthetic
gtcctcttatcaaccggcac

SEQ ID NO: 5581 - DNA, 20 bp, Artificial Sequence
  Synthetic
gatgacggtcggccgtagtt

SEQ ID NO: 5582 - DNA, 20 bp, Artificial Sequence
  Synthetic
gaatcaggaaggctgtagca

SEQ ID NO: 5583 - DNA, 20 bp, Artificial Sequence
  Synthetic
gaaatgtagtcctcccaacg

SEQ ID NO: 5584 - DNA, 20 bp, Artificial Sequence
  Synthetic
ggaagacagaagaaatggaa

SEQ ID NO: 5585 - DNA, 20 bp, Artificial Sequence
  Synthetic
gatagcgtgtatgtgagagt

SEQ ID NO: 5586 - DNA, 20 bp, Artificial Sequence
  Synthetic
gaagaggcatgggagcaacg

SEQ ID NO: 5587 - DNA, 20 bp, Artificial Sequence
  Synthetic
gcttcgatacggcccattag

SEQ ID NO: 5588 - DNA, 20 bp, Artificial Sequence
  Synthetic
ggtccctctgtattcccaga

SEQ ID NO: 5589 - DNA, 20 bp, Artificial Sequence
  Synthetic
gctctcacatacaaatgaag

SEQ ID NO: 5590 - DNA, 20 bp, Artificial Sequence
  Synthetic
ggcctgtttgcctctctaca

SEQ ID NO: 5591 - DNA, 20 bp, Artificial Sequence
  Synthetic
ggagctaatgcagatgtcgc

SEQ ID NO: 5592 - DNA, 20 bp, Artificial Sequence
  Synthetic
gtttggagagatgaaatgaa

SEQ ID NO: 5593 - DNA, 20 bp, Artificial Sequence
  Synthetic
gttgtgttatttccctgttt

SEQ ID NO: 5594 - DNA, 20 bp, Artificial Sequence
  Synthetic
gtttgctaacaggtgcactt

SEQ ID NO: 5595 - DNA, 20 bp, Artificial Sequence
  Synthetic
gttaatgctgtctgacacta

SEQ ID NO: 5596 - DNA, 20 bp, Artificial Sequence
  Synthetic
gcaatgcccagaacccaggc

SEQ ID NO: 5597 - DNA, 20 bp, Artificial Sequence
  Synthetic
gtcttacacaatctaggcgc

SEQ ID NO: 5598 - DNA, 20 bp, Artificial Sequence
  Synthetic
gattcagtgtgcactctcca

SEQ ID NO: 5599 - DNA, 20 bp, Artificial Sequence
  Synthetic
ggttactactatccagtctt

SEQ ID NO: 5600 - DNA, 20 bp, Artificial Sequence
  Synthetic
gcacctatttaaacagcttc

SEQ ID NO: 5601 - DNA, 20 bp, Artificial Sequence
  Synthetic
gtatgattctcagggaccag

SEQ ID NO: 5602 - DNA, 20 bp, Artificial Sequence
  Synthetic
gtcggagtatctttgtgcct

SEQ ID NO: 5603 - DNA, 20 bp, Artificial Sequence
  Synthetic
ggcaggtttaaacatctcct

SEQ ID NO: 5604 - DNA, 20 bp, Artificial Sequence
  Synthetic
gggatagtaggacttagcca

SEQ ID NO: 5605 - DNA, 20 bp, Artificial Sequence
  Synthetic
gacgagtcagggtgaaggta

SEQ ID NO: 5606 - DNA, 20 bp, Artificial Sequence
  Synthetic
gcctcatccaataagatgaa

SEQ ID NO: 5607 - DNA, 20 bp, Artificial Sequence
  Synthetic
gcgtatatgtctccttgaca

SEQ ID NO: 5608 - DNA, 20 bp, Artificial Sequence
  Synthetic
gtcagggtgaaggtagggca

SEQ ID NO: 5609 - DNA, 20 bp, Artificial Sequence
  Synthetic
ggctgagaattgtgtttcca

SEQ ID NO: 5610 - DNA, 20 bp, Artificial Sequence
  Synthetic
gcctgcctcttatcagtcag

SEQ ID NO: 5611 - DNA, 20 bp, Artificial Sequence
  Synthetic
ggtttaaactcagactttac

SEQ ID NO: 5612 - DNA, 20 bp, Artificial Sequence
  Synthetic
gggacattaggaaggcgagc

SEQ ID NO: 5613 - DNA, 20 bp, Artificial Sequence
  Synthetic
ggtgttctggagggagatgg

SEQ ID NO: 5614 - DNA, 20 bp, Artificial Sequence
  Synthetic
gccacttcacactggaacct

SEQ ID NO: 5615 - DNA, 20 bp, Artificial Sequence
  Synthetic
ggcggagagaacagagaagt

SEQ ID NO: 5616 - DNA, 20 bp, Artificial Sequence
  Synthetic
gctgtccttgggatctggcc

SEQ ID NO: 5617 - DNA, 20 bp, Artificial Sequence
  Synthetic
gtatcctccagggagaaagg

SEQ ID NO: 5618 - DNA, 20 bp, Artificial Sequence
  Synthetic
ggatacctggaagacaacca

SEQ ID NO: 5619 - DNA, 20 bp, Artificial Sequence
  Synthetic
gcgcaagacttgccatttag

SEQ ID NO: 5620 - DNA, 20 bp, Artificial Sequence
  Synthetic
gggactcgaccactaagttt

SEQ ID NO: 5621 - DNA, 20 bp, Artificial Sequence
  Synthetic
gggcggtaaagagaggatga

SEQ ID NO: 5622 - DNA, 20 bp, Artificial Sequence
  Synthetic
gctgctggcgaggcattgaa

SEQ ID NO: 5623 - DNA, 20 bp, Artificial Sequence
  Synthetic
gctattgtttccgatctgct

SEQ ID NO: 5624 - DNA, 20 bp, Artificial Sequence
  Synthetic
ggtaatcctcctttgtcagt

SEQ ID NO: 5625 - DNA, 20 bp, Artificial Sequence
  Synthetic
gagtcaaccaatcgcagcag

SEQ ID NO: 5626 - DNA, 20 bp, Artificial Sequence
  Synthetic
ggttccagaagataactagg

SEQ ID NO: 5627 - DNA, 20 bp, Artificial Sequence
  Synthetic
gcacacttagaactaaccaa

SEQ ID NO: 5628 - DNA, 20 bp, Artificial Sequence
  Synthetic
gatttctaagaggccctgtg

SEQ ID NO: 5629 - DNA, 20 bp, Artificial Sequence
  Synthetic
gcttggaagtggtagtggtg

SEQ ID NO: 5630 - DNA, 20 bp, Artificial Sequence
  Synthetic
gcttcaggaagggccatatt

SEQ ID NO: 5631 - DNA, 20 bp, Artificial Sequence
  Synthetic
gggtggagccaacgtgaagg

SEQ ID NO: 5632 - DNA, 20 bp, Artificial Sequence
  Synthetic
gcagactgagcggagcttct

SEQ ID NO: 5633 - DNA, 20 bp, Artificial Sequence
  Synthetic
ggctgaatggtgttacagcc

SEQ ID NO: 5634 - DNA, 20 bp, Artificial Sequence
  Synthetic
ggagagcttgctgatgaata

SEQ ID NO: 5635 - DNA, 20 bp, Artificial Sequence
  Synthetic
gctgatgaatagggtgaatt

SEQ ID NO: 5636 - DNA, 20 bp, Artificial Sequence
  Synthetic
gggagagcttgctgatgaat

SEQ ID NO: 5637 - DNA, 20 bp, Artificial Sequence
  Synthetic
gtggaagagccctgcattgg

SEQ ID NO: 5638 - DNA, 20 bp, Artificial Sequence
  Synthetic
gtggcaccaaagggtgggtg

SEQ ID NO: 5639 - DNA, 20 bp, Artificial Sequence
  Synthetic
gaggcttgtatgtataaggc

SEQ ID NO: 5640 - DNA, 20 bp, Artificial Sequence
  Synthetic
gatggtttcctaagtgtgaa

SEQ ID NO: 5641 - DNA, 20 bp, Artificial Sequence
  Synthetic
ggagagagctgaagggataa

SEQ ID NO: 5642 - DNA, 20 bp, Artificial Sequence
  Synthetic
ggtcaggtagacacacacat

SEQ ID NO: 5643 - DNA, 20 bp, Artificial Sequence
  Synthetic
ggagcccacttgggaagaga

SEQ ID NO: 5644 - DNA, 20 bp, Artificial Sequence
  Synthetic
gtcctcctcccacggcagaa

SEQ ID NO: 5645 - DNA, 20 bp, Artificial Sequence
  Synthetic
gagcacaatgggattccttg

SEQ ID NO: 5646 - DNA, 20 bp, Artificial Sequence
  Synthetic
ggaagcttggccaggaagag

SEQ ID NO: 5647 - DNA, 20 bp, Artificial Sequence
  Synthetic
gggcaagggagggagcttta

SEQ ID NO: 5648 - DNA, 20 bp, Artificial Sequence
  Synthetic
gtgagctcagataaaggcgg

SEQ ID NO: 5649 - DNA, 20 bp, Artificial Sequence
  Synthetic
gttgccagagagggttatcg

SEQ ID NO: 5650 - DNA, 20 bp, Artificial Sequence
  Synthetic
gtagagacaaacaggtgctc

SEQ ID NO: 5651 - DNA, 20 bp, Artificial Sequence
  Synthetic
gtccaccctcgagtgtcagt

SEQ ID NO: 5652 - DNA, 20 bp, Artificial Sequence
  Synthetic
gttcacttgcctaggctaat

SEQ ID NO: 5653 - DNA, 20 bp, Artificial Sequence
  Synthetic
ggatctgggtgaattgcctg

SEQ ID NO: 5654 - DNA, 20 bp, Artificial Sequence
  Synthetic
gcttgctgaaatcaattcct

SEQ ID NO: 5655 - DNA, 20 bp, Artificial Sequence
  Synthetic
gatgttggaagttcagtggc

SEQ ID NO: 5656 - DNA, 20 bp, Artificial Sequence
  Synthetic
gacagattctgctaattgaa

SEQ ID NO: 5657 - DNA, 20 bp, Artificial Sequence
  Synthetic
gtcactgtagcgtcaggcca

SEQ ID NO: 5658 - DNA, 20 bp, Artificial Sequence
  Synthetic
gtgaccctgcctaccgtgga

SEQ ID NO: 5659 - DNA, 20 bp, Artificial Sequence
  Synthetic
ggcatggccttggagagcac

SEQ ID NO: 5660 - DNA, 20 bp, Artificial Sequence
  Synthetic
gtggtcctcactctctaagt

SEQ ID NO: 5661 - DNA, 20 bp, Artificial Sequence
  Synthetic
gctttctcagcggcgccgaa

SEQ ID NO: 5662 - DNA, 20 bp, Artificial Sequence
  Synthetic
gaggatcatggatggcagtt

SEQ ID NO: 5663 - DNA, 20 bp, Artificial Sequence
  Synthetic
ggaactagcaactcagactc

SEQ ID NO: 5664 - DNA, 20 bp, Artificial Sequence
  Synthetic
gaactagcaactcagactca

SEQ ID NO: 5665 - DNA, 20 bp, Artificial Sequence
  Synthetic
gcccgggttcaattccggat

SEQ ID NO: 5666 - DNA, 20 bp, Artificial Sequence
  Synthetic
gaccaagctggcttgaagta

SEQ ID NO: 5667 - DNA, 20 bp, Artificial Sequence
  Synthetic
ggtgtggtcaacccagggtg

SEQ ID NO: 5668 - DNA, 20 bp, Artificial Sequence
  Synthetic
gagtctgagttgctagttcc

SEQ ID NO: 5669 - DNA, 20 bp, Artificial Sequence
  Synthetic
gcacatctgtcctttctcca

SEQ ID NO: 5670 - DNA, 20 bp, Artificial Sequence
  Synthetic
gatttcaggttaccacaccc

SEQ ID NO: 5671 - DNA, 20 bp, Artificial Sequence
  Synthetic
ggcgccgacgtcttctgttt

SEQ ID NO: 5672 - DNA, 20 bp, Artificial Sequence
  Synthetic
gccctacaaacttctcctgg

SEQ ID NO: 5673 - DNA, 20 bp, Artificial Sequence
  Synthetic
ggagatttccgcgaactgtg

SEQ ID NO: 5674 - DNA, 20 bp, Artificial Sequence
  Synthetic
gtcttcttgggactagagaa

SEQ ID NO: 5675 - DNA, 20 bp, Artificial Sequence
  Synthetic
gtggctgaagacagccagag

SEQ ID NO: 5676 - DNA, 20 bp, Artificial Sequence
  Synthetic
gctcctagaaccaagcatca

SEQ ID NO: 5677 - DNA, 20 bp, Artificial Sequence
  Synthetic
gaagacacatacagtattgt

SEQ ID NO: 5678 - DNA, 20 bp, Artificial Sequence
  Synthetic
gctgccaatggctatagaag

SEQ ID NO: 5679 - DNA, 20 bp, Artificial Sequence
  Synthetic
gtgagcgggagctgtccaga

SEQ ID NO: 5680 - DNA, 20 bp, Artificial Sequence
  Synthetic
gggaagaagggaggagaagg

SEQ ID NO: 5681 - DNA, 20 bp, Artificial Sequence
  Synthetic
gagttctgttctggagcttt

SEQ ID NO: 5682 - DNA, 20 bp, Artificial Sequence
  Synthetic
gtttcccaatgcgcaggcgc

SEQ ID NO: 5683 - DNA, 20 bp, Artificial Sequence
  Synthetic
gttactaagggattgcttct

SEQ ID NO: 5684 - DNA, 20 bp, Artificial Sequence
  Synthetic
gcacagtaaagctgaggagt

SEQ ID NO: 5685 - DNA, 20 bp, Artificial Sequence
  Synthetic
ggagctttagaatggaattc

SEQ ID NO: 5686 - DNA, 20 bp, Artificial Sequence
  Synthetic
gaaactagtggatggagggc

SEQ ID NO: 5687 - DNA, 20 bp, Artificial Sequence
  Synthetic
gtatgcctaaggtgctggtg

SEQ ID NO: 5688 - DNA, 20 bp, Artificial Sequence
  Synthetic
ggagtttcctcttcttcact

SEQ ID NO: 5689 - DNA, 20 bp, Artificial Sequence
  Synthetic
gggactgaggtcacctcagt

SEQ ID NO: 5690 - DNA, 20 bp, Artificial Sequence
  Synthetic
gcttgcttccagatgcatcc

SEQ ID NO: 5691 - DNA, 20 bp, Artificial Sequence
  Synthetic
gtcaccttgggctctgtgtc

SEQ ID NO: 5692 - DNA, 20 bp, Artificial Sequence
  Synthetic
ggtctgtctacctggtgagc

SEQ ID NO: 5693 - DNA, 20 bp, Artificial Sequence
  Synthetic
gagaacgcctaggaagagtt

SEQ ID NO: 5694 - DNA, 20 bp, Artificial Sequence
  Synthetic
ggacttctctgcgggcttgg

SEQ ID NO: 5695 - DNA, 20 bp, Artificial Sequence
  Synthetic
gagctgtcccagctccctgt

SEQ ID NO: 5696 - DNA, 20 bp, Artificial Sequence
  Synthetic
gacacggagctgagggtgga

SEQ ID NO: 5697 - DNA, 20 bp, Artificial Sequence
  Synthetic
ggtcttgagcctcagctccc

SEQ ID NO: 5698 - DNA, 20 bp, Artificial Sequence
  Synthetic
ggacaccacggctcgtttgg

SEQ ID NO: 5699 - DNA, 20 bp, Artificial Sequence
  Synthetic
ggcaggttattgtttgccaa

SEQ ID NO: 5700 - DNA, 20 bp, Artificial Sequence
  Synthetic
gcagagcgagaacagggagt

SEQ ID NO: 5701 - DNA, 20 bp, Artificial Sequence
  Synthetic
gtttgggagcagatcagaaa

SEQ ID NO: 5702 - DNA, 20 bp, Artificial Sequence
  Synthetic
ggctcagtaggccagagtct

SEQ ID NO: 5703 - DNA, 20 bp, Artificial Sequence
  Synthetic
gggaaatctgagaatgggag

SEQ ID NO: 5704 - DNA, 20 bp, Artificial Sequence
  Synthetic
gggctcagtaggccagagtc

SEQ ID NO: 5705 - DNA, 20 bp, Artificial Sequence
  Synthetic
gaagagcaaggagacaaagg

SEQ ID NO: 5706 - DNA, 20 bp, Artificial Sequence
  Synthetic
ggtgggatgtgtgtgggctg

SEQ ID NO: 5707 - DNA, 20 bp, Artificial Sequence
  Synthetic
ggaaatctgagaatgggagg

SEQ ID NO: 5708 - DNA, 20 bp, Artificial Sequence
  Synthetic
gtgcttgtgctctgaagtct

SEQ ID NO: 5709 - DNA, 20 bp, Artificial Sequence
  Synthetic
gagcaaggagacaaaggagg

SEQ ID NO: 5710 - DNA, 20 bp, Artificial Sequence
  Synthetic
gtttattcggctggaaactg

SEQ ID NO: 5711 - DNA, 20 bp, Artificial Sequence
  Synthetic
gaggatggaggagtttgtgg

SEQ ID NO: 5712 - DNA, 20 bp, Artificial Sequence
  Synthetic
ggtgagaacggcagaagatg

SEQ ID NO: 5713 - DNA, 20 bp, Artificial Sequence
  Synthetic
ggcactccttgatgctccct

SEQ ID NO: 5714 - DNA, 20 bp, Artificial Sequence
  Synthetic
gagcggaggaggagttgctg

SEQ ID NO: 5715 - DNA, 20 bp, Artificial Sequence
  Synthetic
gacaaaggatcagggccgcc

SEQ ID NO: 5716 - DNA, 20 bp, Artificial Sequence
  Synthetic
ggcatctcctactgaatact

SEQ ID NO: 5717 - DNA, 20 bp, Artificial Sequence
  Synthetic
gaacgagttgaggagggcga

SEQ ID NO: 5718 - DNA, 20 bp, Artificial Sequence
  Synthetic
gaggagtggcgtcaagctgc

SEQ ID NO: 5719 - DNA, 20 bp, Artificial Sequence
  Synthetic
gctaggcaaaggtacgggtc

SEQ ID NO: 5720 - DNA, 20 bp, Artificial Sequence
  Synthetic
gagccggagggaaaggaaga

SEQ ID NO: 5721 - DNA, 20 bp, Artificial Sequence
  Synthetic
gcctgtattaacatcgatgg

SEQ ID NO: 5722 - DNA, 20 bp, Artificial Sequence
  Synthetic
gcaaagaatgtgtgggtcag

SEQ ID NO: 5723 - DNA, 20 bp, Artificial Sequence
  Synthetic
gccctagcggctttgagaag

SEQ ID NO: 5724 - DNA, 20 bp, Artificial Sequence
  Synthetic
gaaaggaagaaggaggtacg

SEQ ID NO: 5725 - DNA, 20 bp, Artificial Sequence
  Synthetic
ggacagccagacctgagggt

SEQ ID NO: 5726 - DNA, 20 bp, Artificial Sequence
  Synthetic
gctaattgctgtaaatccca

SEQ ID NO: 5727 - DNA, 20 bp, Artificial Sequence
  Synthetic
gagcgtgcatttggaggcgt

SEQ ID NO: 5728 - DNA, 20 bp, Artificial Sequence
  Synthetic
gtccctaaggcctttcattt

SEQ ID NO: 5729 - DNA, 20 bp, Artificial Sequence
  Synthetic
gggatggaacctgcagttaa

SEQ ID NO: 5730 - DNA, 20 bp, Artificial Sequence
  Synthetic
ggaatggaaaccggttcgac

SEQ ID NO: 5731 - DNA, 20 bp, Artificial Sequence
  Synthetic
gaattgctcaccctggcctt

SEQ ID NO: 5732 - DNA, 20 bp, Artificial Sequence
  Synthetic
gagaggtatttgctgggcac

SEQ ID NO: 5733 - DNA, 20 bp, Artificial Sequence
  Synthetic
gcctgggttaggttggactc

SEQ ID NO: 5734 - DNA, 20 bp, Artificial Sequence
  Synthetic
ggtgctggcctgggttaggt

SEQ ID NO: 5735 - DNA, 20 bp, Artificial Sequence
  Synthetic
gtccaaatcagagtgaaagg

SEQ ID NO: 5736 - DNA, 20 bp, Artificial Sequence
  Synthetic
gacgattcatcccatgaaca

SEQ ID NO: 5737 - DNA, 20 bp, Artificial Sequence
  Synthetic
gaagtgtgggctatgacaga

SEQ ID NO: 5738 - DNA, 20 bp, Artificial Sequence
  Synthetic
ggagggaagtgtgtgtgtgt

SEQ ID NO: 5739 - DNA, 20 bp, Artificial Sequence
  Synthetic
gcgagaggaaacttggcgcg

SEQ ID NO: 5740 - DNA, 20 bp, Artificial Sequence
  Synthetic
gtgcaggaagagggcaggct

SEQ ID NO: 5741 - DNA, 20 bp, Artificial Sequence
  Synthetic
ggccaaagtggcctggaagt

SEQ ID NO: 5742 - DNA, 20 bp, Artificial Sequence
  Synthetic
gttgacaccgttatgttgca

SEQ ID NO: 5743 - DNA, 20 bp, Artificial Sequence
  Synthetic
gggttcctacaacgatagct

SEQ ID NO: 5744 - DNA, 20 bp, Artificial Sequence
  Synthetic
ggaatctcggtggtcggatg

SEQ ID NO: 5745 - DNA, 20 bp, Artificial Sequence
  Synthetic
gggctaaattgcctggcggc

SEQ ID NO: 5746 - DNA, 20 bp, Artificial Sequence
  Synthetic
gaccttcacgagcggtttag

SEQ ID NO: 5747 - DNA, 20 bp, Artificial Sequence
  Synthetic
gggatcctctcttccgactg

SEQ ID NO: 5748 - DNA, 20 bp, Artificial Sequence
  Synthetic
gattactgatgcctagcggc

SEQ ID NO: 5749 - DNA, 20 bp, Artificial Sequence
  Synthetic
gcacgtgtccttgggaggtt

SEQ ID NO: 5750 - DNA, 20 bp, Artificial Sequence
  Synthetic
gaaatttaacaaatggcgtg

SEQ ID NO: 5751 - DNA, 20 bp, Artificial Sequence
  Synthetic
gtgggtgaggtggaattatt

SEQ ID NO: 5752 - DNA, 20 bp, Artificial Sequence
  Synthetic
gggcttcagcacgtgtcctt

SEQ ID NO: 5753 - DNA, 20 bp, Artificial Sequence
  Synthetic
gctggtctctgcctctggga

SEQ ID NO: 5754 - DNA, 20 bp, Artificial Sequence
  Synthetic
gatagattactgatgcctag

SEQ ID NO: 5755 - DNA, 20 bp, Artificial Sequence
  Synthetic
gggcaagctgcagctgtttg

SEQ ID NO: 5756 - DNA, 20 bp, Artificial Sequence
  Synthetic
ggcgttcggcacaaagaaag

SEQ ID NO: 5757 - DNA, 20 bp, Artificial Sequence
  Synthetic
ggtagacctagagagggagg

SEQ ID NO: 5758 - DNA, 20 bp, Artificial Sequence
  Synthetic
gtcaaggatggtccagaaga

SEQ ID NO: 5759 - DNA, 20 bp, Artificial Sequence
  Synthetic
gtgttcaactgtgctattga

SEQ ID NO: 5760 - DNA, 20 bp, Artificial Sequence
  Synthetic
gaaactgtgtacctcagtct

SEQ ID NO: 5761 - DNA, 20 bp, Artificial Sequence
  Synthetic
ggtattaccatgcaaatgaa

SEQ ID NO: 5762 - DNA, 20 bp, Artificial Sequence
  Synthetic
gatgcgcacgtgctgagtcg

SEQ ID NO: 5763 - DNA, 20 bp, Artificial Sequence
  Synthetic
ggatcaggctgcgctagcat

SEQ ID NO: 5764 - DNA, 20 bp, Artificial Sequence
  Synthetic
gaaggtagacctagagaggg

SEQ ID NO: 5765 - DNA, 20 bp, Artificial Sequence
  Synthetic
gtattaccatgcaaatgaac

SEQ ID NO: 5766 - DNA, 20 bp, Artificial Sequence
  Synthetic
gaccagctcattgcttcctt

SEQ ID NO: 5767 - DNA, 20 bp, Artificial Sequence
  Synthetic
gggccagaggactaaggtga

SEQ ID NO: 5768 - DNA, 20 bp, Artificial Sequence
  Synthetic
ggagaggaatgagttctggt

SEQ ID NO: 5769 - DNA, 20 bp, Artificial Sequence
  Synthetic
gaaaccactactcgctcact

SEQ ID NO: 5770 - DNA, 20 bp, Artificial Sequence
  Synthetic
gttcctggctcaggtatccc

SEQ ID NO: 5771 - DNA, 20 bp, Artificial Sequence
  Synthetic
gggtaagagaaaggcggagg

SEQ ID NO: 5772 - DNA, 20 bp, Artificial Sequence
  Synthetic
ggaagccaagaactaggagg

SEQ ID NO: 5773 - DNA, 20 bp, Artificial Sequence
  Synthetic
ggcactcctgttatgagtac

SEQ ID NO: 5774 - DNA, 20 bp, Artificial Sequence
  Synthetic
ggaaggctgccctgttctaa

SEQ ID NO: 5775 - DNA, 20 bp, Artificial Sequence
  Synthetic
gagaatcatgcgtgcgtgga

SEQ ID NO: 5776 - DNA, 20 bp, Artificial Sequence
  Synthetic
ggtaggagtcagtctgagac

SEQ ID NO: 5777 - DNA, 20 bp, Artificial Sequence
  Synthetic
gaagccctttgtctcctaac

SEQ ID NO: 5778 - DNA, 20 bp, Artificial Sequence
  Synthetic
gtataagtcacatgcggctt

SEQ ID NO: 5779 - DNA, 20 bp, Artificial Sequence
  Synthetic
gagtttgagaggcgacacgg

SEQ ID NO: 5780 - DNA, 20 bp, Artificial Sequence
  Synthetic
gctggcgaatcacagagtgg

SEQ ID NO: 5781 - DNA, 20 bp, Artificial Sequence
  Synthetic
gaaccaagagagctcagggc

SEQ ID NO: 5782 - DNA, 20 bp, Artificial Sequence
  Synthetic
ggcggttctaaatgcccggt

SEQ ID NO: 5783 - DNA, 20 bp, Artificial Sequence
  Synthetic
gcatgccttcccaggactcc

SEQ ID NO: 5784 - DNA, 20 bp, Artificial Sequence
  Synthetic
ggccagcctaatgaatattc

SEQ ID NO: 5785 - DNA, 20 bp, Artificial Sequence
  Synthetic
ggctccaagttgcaagcaat

SEQ ID NO: 5786 - DNA, 20 bp, Artificial Sequence
  Synthetic
ggcaaagacacgcgctgatt

SEQ ID NO: 5787 - DNA, 20 bp, Artificial Sequence
  Synthetic
gggcagacagaggaaataag

SEQ ID NO: 5788 - DNA, 20 bp, Artificial Sequence
  Synthetic
ggcttgggatcctgcactca

SEQ ID NO: 5789 - DNA, 20 bp, Artificial Sequence
  Synthetic
gaactggagagtgctaggta

SEQ ID NO: 5790 - DNA, 20 bp, Artificial Sequence
  Synthetic
gcaacaagtagggatgaaga

SEQ ID NO: 5791 - DNA, 20 bp, Artificial Sequence
  Synthetic
gacttccctggacacatgtg

SEQ ID NO: 5792 - DNA, 20 bp, Artificial Sequence
  Synthetic
gcagaccacacatgtgtcca

SEQ ID NO: 5793 - DNA, 20 bp, Artificial Sequence
  Synthetic
gtctgggtagggtagggtgc

SEQ ID NO: 5794 - DNA, 20 bp, Artificial Sequence
  Synthetic
ggagctggaatggccttggc

SEQ ID NO: 5795 - DNA, 20 bp, Artificial Sequence
  Synthetic
gggcttcagagtccaccttg

SEQ ID NO: 5796 - DNA, 20 bp, Artificial Sequence
  Synthetic
gggtattcaacatgaacacc

SEQ ID NO: 5797 - DNA, 20 bp, Artificial Sequence
  Synthetic
ggatcgttggctcctgcctt

SEQ ID NO: 5798 - DNA, 20 bp, Artificial Sequence
  Synthetic
gagccttcactcaggagcag

SEQ ID NO: 5799 - DNA, 20 bp, Artificial Sequence
  Synthetic
gtataattgtgagcagatgg

SEQ ID NO: 5800 - DNA, 20 bp, Artificial Sequence
  Synthetic
gcttcacagagccttcactc

SEQ ID NO: 5801 - DNA, 20 bp, Artificial Sequence
  Synthetic
gttgtaaagactgagagaga

SEQ ID NO: 5802 - DNA, 20 bp, Artificial Sequence
  Synthetic
gcagtgtgtcaggcccagac

SEQ ID NO: 5803 - DNA, 20 bp, Artificial Sequence
  Synthetic
ggcagaaacgaaatagtgat

SEQ ID NO: 5804 - DNA, 20 bp, Artificial Sequence
  Synthetic
gaaggagaacctgagtcaca

SEQ ID NO: 5805 - DNA, 20 bp, Artificial Sequence
  Synthetic
gaggcggcattgctgctctc

SEQ ID NO: 5806 - DNA, 20 bp, Artificial Sequence
  Synthetic
ggaaggagaacctgagtcac

SEQ ID NO: 5807 - DNA, 20 bp, Artificial Sequence
  Synthetic
gcaaagggctgcagaagggt

SEQ ID NO: 5808 - DNA, 20 bp, Artificial Sequence
  Synthetic
gctctagggccactggacaa

SEQ ID NO: 5809 - DNA, 20 bp, Artificial Sequence
  Synthetic
ggtgtaggagaaagcagaaa

SEQ ID NO: 5810 - DNA, 20 bp, Artificial Sequence
  Synthetic
gcctagagttcgaggatagg

SEQ ID NO: 5811 - DNA, 20 bp, Artificial Sequence
  Synthetic
gaacctaaggacaggctacg

SEQ ID NO: 5812 - DNA, 20 bp, Artificial Sequence
  Synthetic
gaggacctaaggcactggat

SEQ ID NO: 5813 - DNA, 20 bp, Artificial Sequence
  Synthetic
gctaatgggccagtgaggag

SEQ ID NO: 5814 - DNA, 20 bp, Artificial Sequence
  Synthetic
gtattgtcctccctgaggtt

SEQ ID NO: 5815 - DNA, 20 bp, Artificial Sequence
  Synthetic
gagggctgctggagcttgtt

SEQ ID NO: 5816 - DNA, 20 bp, Artificial Sequence
  Synthetic
gggaaaggtggctgactagc

SEQ ID NO: 5817 - DNA, 20 bp, Artificial Sequence
  Synthetic
gacagatagataagctggcg

SEQ ID NO: 5818 - DNA, 20 bp, Artificial Sequence
  Synthetic
gaagagtctaaggcaatgaa

SEQ ID NO: 5819 - DNA, 20 bp, Artificial Sequence
  Synthetic
gacttctctgatctggaact

SEQ ID NO: 5820 - DNA, 20 bp, Artificial Sequence
  Synthetic
gaagttctgactggaaggta

SEQ ID NO: 5821 - DNA, 20 bp, Artificial Sequence
  Synthetic
gaggaccagaccacagagtc

SEQ ID NO: 5822 - DNA, 20 bp, Artificial Sequence
  Synthetic
gggtcagtagcatgctgaga

SEQ ID NO: 5823 - DNA, 20 bp, Artificial Sequence
  Synthetic
gggagacagacagataaagc

SEQ ID NO: 5824 - DNA, 20 bp, Artificial Sequence
  Synthetic
gtccactagaaagggctcca

SEQ ID NO: 5825 - DNA, 20 bp, Artificial Sequence
  Synthetic
gtggactcagaatgtcctgg

SEQ ID NO: 5826 - DNA, 20 bp, Artificial Sequence
  Synthetic
gcagctatgtgtcctgtgca

SEQ ID NO: 5827 - DNA, 20 bp, Artificial Sequence
  Synthetic
gcgctgagaggagggatcga

SEQ ID NO: 5828 - DNA, 20 bp, Artificial Sequence
  Synthetic
gaggcgacatcagcaaggct

SEQ ID NO: 5829 - DNA, 20 bp, Artificial Sequence
  Synthetic
ggcgatttcacatccagcag

SEQ ID NO: 5830 - DNA, 20 bp, Artificial Sequence
  Synthetic
gggatcttctctgtccgctc

SEQ ID NO: 5831 - DNA, 20 bp, Artificial Sequence
  Synthetic
ggagaatctacaggccagtg

SEQ ID NO: 5832 - DNA, 20 bp, Artificial Sequence
  Synthetic
gagtgagaactttggtctga

SEQ ID NO: 5833 - DNA, 20 bp, Artificial Sequence
  Synthetic
gatgctgcatttaggtacct

SEQ ID NO: 5834 - DNA, 20 bp, Artificial Sequence
  Synthetic
gagcttctgtttctggagga

SEQ ID NO: 5835 - DNA, 20 bp, Artificial Sequence
  Synthetic
gagggactgttctgccttga

SEQ ID NO: 5836 - DNA, 20 bp, Artificial Sequence
  Synthetic
ggagataggttgttagcttg

SEQ ID NO: 5837 - DNA, 20 bp, Artificial Sequence
  Synthetic
ggttgcctgcacaatcttcc

SEQ ID NO: 5838 - DNA, 20 bp, Artificial Sequence
  Synthetic
gtatgtgggagcaaatgtcc

SEQ ID NO: 5839 - DNA, 20 bp, Artificial Sequence
  Synthetic
gagtgggagatgaaagcctg

SEQ ID NO: 5840 - DNA, 20 bp, Artificial Sequence
  Synthetic
gccatgtcatctccaagaag

SEQ ID NO: 5841 - DNA, 20 bp, Artificial Sequence
  Synthetic
ggcactgtgtgcccttgctt

SEQ ID NO: 5842 - DNA, 20 bp, Artificial Sequence
  Synthetic
gggctaaacctcagtcaagc

SEQ ID NO: 5843 - DNA, 20 bp, Artificial Sequence
  Synthetic
gttcgtgcccatccaaagct

SEQ ID NO: 5844 - DNA, 20 bp, Artificial Sequence
  Synthetic
ggaggtgtgcgacagctaaa

SEQ ID NO: 5845 - DNA, 20 bp, Artificial Sequence
  Synthetic
ggtctcctctggacaattac

SEQ ID NO: 5846 - DNA, 20 bp, Artificial Sequence
  Synthetic
ggagggtcagagcaaacagc

SEQ ID NO: 5847 - DNA, 20 bp, Artificial Sequence
  Synthetic
gctaagactcctgggatctg

SEQ ID NO: 5848 - DNA, 20 bp, Artificial Sequence
  Synthetic
gaattgagtgcgggttactg

SEQ ID NO: 5849 - DNA, 20 bp, Artificial Sequence
  Synthetic
gtggaatctagctcttccca

SEQ ID NO: 5850 - DNA, 20 bp, Artificial Sequence
  Synthetic
gcaaacatttggcaagataa

SEQ ID NO: 5851 - DNA, 20 bp, Artificial Sequence
  Synthetic
gtaagcgcaagtgggctttg

SEQ ID NO: 5852 - DNA, 20 bp, Artificial Sequence
  Synthetic
gaatctcataaagtgttgcc

SEQ ID NO: 5853 - DNA, 20 bp, Artificial Sequence
  Synthetic
ggtgtgagggagaaagataa

SEQ ID NO: 5854 - DNA, 20 bp, Artificial Sequence
  Synthetic
gagatcactctggcccggag

SEQ ID NO: 5855 - DNA, 20 bp, Artificial Sequence
  Synthetic
gatttatgtcttggcccaca

SEQ ID NO: 5856 - DNA, 20 bp, Artificial Sequence
  Synthetic
gctgcacaaatcgtctgaga

SEQ ID NO: 5857 - DNA, 20 bp, Artificial Sequence
  Synthetic
ggccagagtgatctcaaagg

SEQ ID NO: 5858 - DNA, 20 bp, Artificial Sequence
  Synthetic
gccaggtcaagtattaagag

SEQ ID NO: 5859 - DNA, 20 bp, Artificial Sequence
  Synthetic
gcaatagaaaccggaaggca

SEQ ID NO: 5860 - DNA, 20 bp, Artificial Sequence
  Synthetic
ggactgaagactggtatctg

SEQ ID NO: 5861 - DNA, 20 bp, Artificial Sequence
  Synthetic
gagggaggagcagatctcca

SEQ ID NO: 5862 - DNA, 20 bp, Artificial Sequence
  Synthetic
gctctcagcgatctggccag

SEQ ID NO: 5863 - DNA, 20 bp, Artificial Sequence
  Synthetic
gacatgtgggacctagtgac

SEQ ID NO: 5864 - DNA, 20 bp, Artificial Sequence
  Synthetic
gtcaaacaagctgtttgggt

SEQ ID NO: 5865 - DNA, 20 bp, Artificial Sequence
  Synthetic
gacagactcagcagcagggt

SEQ ID NO: 5866 - DNA, 20 bp, Artificial Sequence
  Synthetic
gggtcaagatcttccagggt

SEQ ID NO: 5867 - DNA, 20 bp, Artificial Sequence
  Synthetic
gggaaccaacccagggagaa

SEQ ID NO: 5868 - DNA, 20 bp, Artificial Sequence
  Synthetic
gagaggagggaggagggaga

SEQ ID NO: 5869 - DNA, 20 bp, Artificial Sequence
  Synthetic
gagttgctgctgagagttca

SEQ ID NO: 5870 - DNA, 20 bp, Artificial Sequence
  Synthetic
ggcgggacagagccaagaaa

SEQ ID NO: 5871 - DNA, 20 bp, Artificial Sequence
  Synthetic
gactttcgaacgctccaatt

SEQ ID NO: 5872 - DNA, 20 bp, Artificial Sequence
  Synthetic
ggtaagccttgtagcttgcc

SEQ ID NO: 5873 - DNA, 20 bp, Artificial Sequence
  Synthetic
gtccacagcggctgctgact

SEQ ID NO: 5874 - DNA, 20 bp, Artificial Sequence
  Synthetic
gtgaagttgactacagccga

SEQ ID NO: 5875 - DNA, 20 bp, Artificial Sequence
  Synthetic
gcgcaaagcccaatgagaga

SEQ ID NO: 5876 - DNA, 20 bp, Artificial Sequence
  Synthetic
gtcaagattatgagcctaga

SEQ ID NO: 5877 - DNA, 20 bp, Artificial Sequence
  Synthetic
gctgtcctcagtctcctccg

SEQ ID NO: 5878 - DNA, 20 bp, Artificial Sequence
  Synthetic
gcagttctttaaatgccaga

SEQ ID NO: 5879 - DNA, 20 bp, Artificial Sequence
  Synthetic
gctaataatagggaaggagc

SEQ ID NO: 5880 - DNA, 20 bp, Artificial Sequence
  Synthetic
gaactgctcgcttgctccct

SEQ ID NO: 5881 - DNA, 20 bp, Artificial Sequence
  Synthetic
gcgccttgtgctttctttgc

SEQ ID NO: 5882 - DNA, 20 bp, Artificial Sequence
  Synthetic
ggacccggcagagattgaga

SEQ ID NO: 5883 - DNA, 20 bp, Artificial Sequence
  Synthetic
gacctcctccaggctgacta

SEQ ID NO: 5884 - DNA, 20 bp, Artificial Sequence
  Synthetic
gcaccgctcctctaaggtct

SEQ ID NO: 5885 - DNA, 20 bp, Artificial Sequence
  Synthetic
gagccggcaaagaaagcaca

SEQ ID NO: 5886 - DNA, 20 bp, Artificial Sequence
  Synthetic
gtcagggcgacctcccaaga

SEQ ID NO: 5887 - DNA, 20 bp, Artificial Sequence
  Synthetic
ggagccaggtggagggaaat

SEQ ID NO: 5888 - DNA, 20 bp, Artificial Sequence
  Synthetic
gggacccggcagagattgag

SEQ ID NO: 5889 - DNA, 20 bp, Artificial Sequence
  Synthetic
gctcaggcctaaatacgaag

SEQ ID NO: 5890 - DNA, 20 bp, Artificial Sequence
  Synthetic
ggatgacaaaggtgaacctc

SEQ ID NO: 5891 - DNA, 20 bp, Artificial Sequence
  Synthetic
gctttgggatcaagatagga

SEQ ID NO: 5892 - DNA, 20 bp, Artificial Sequence
  Synthetic
gttcttccgctagaggccac

SEQ ID NO: 5893 - DNA, 20 bp, Artificial Sequence
  Synthetic
gtgatacaagctgataccat

SEQ ID NO: 5894 - DNA, 20 bp, Artificial Sequence
  Synthetic
gaagaggtggccaatgcttt

SEQ ID NO: 5895 - DNA, 20 bp, Artificial Sequence
  Synthetic
ggccaaaggtaaagggtaaa

SEQ ID NO: 5896 - DNA, 20 bp, Artificial Sequence
  Synthetic
gtggtggaaagaaagacatt

SEQ ID NO: 5897 - DNA, 20 bp, Artificial Sequence
  Synthetic
gtggcctctagcggaagaac

SEQ ID NO: 5898 - DNA, 20 bp, Artificial Sequence
  Synthetic
gaaagacatttggagtcact

SEQ ID NO: 5899 - DNA, 20 bp, Artificial Sequence
  Synthetic
gatgcttctcgaaagtctgg

SEQ ID NO: 5900 - DNA, 20 bp, Artificial Sequence
  Synthetic
gagtggctggttgcacggag

SEQ ID NO: 5901 - DNA, 20 bp, Artificial Sequence
  Synthetic
ggtatctaggtactgatgga

SEQ ID NO: 5902 - DNA, 20 bp, Artificial Sequence
  Synthetic
ggaagacacacttagtcatt

SEQ ID NO: 5903 - DNA, 20 bp, Artificial Sequence
  Synthetic
gaaggcaggaagcctgcatt

SEQ ID NO: 5904 - DNA, 20 bp, Artificial Sequence
  Synthetic
ggcaacctgtaatctggagg

SEQ ID NO: 5905 - DNA, 20 bp, Artificial Sequence
  Synthetic
ggcctctgctgaccttcagc

SEQ ID NO: 5906 - DNA, 20 bp, Artificial Sequence
  Synthetic
gtccagctgaaggtcagcag

SEQ ID NO: 5907 - DNA, 20 bp, Artificial Sequence
  Synthetic
gctacttggttactatggtg

SEQ ID NO: 5908 - DNA, 20 bp, Artificial Sequence
  Synthetic
ggtggttctgatggtcgggc

SEQ ID NO: 5909 - DNA, 20 bp, Artificial Sequence
  Synthetic
gaaagctggaggagcccatg

SEQ ID NO: 5910 - DNA, 20 bp, Artificial Sequence
  Synthetic
gagcctgtagaggaagctta

SEQ ID NO: 5911 - DNA, 20 bp, Artificial Sequence
  Synthetic
ggttacagactgcctgctct

SEQ ID NO: 5912 - DNA, 20 bp, Artificial Sequence
  Synthetic
ggctgctggatttcctgcaa

SEQ ID NO: 5913 - DNA, 20 bp, Artificial Sequence
  Synthetic
gatctcttgctgtcttctcc

SEQ ID NO: 5914 - DNA, 20 bp, Artificial Sequence
  Synthetic
gagccatacagggaggatcc

SEQ ID NO: 5915 - DNA, 20 bp, Artificial Sequence
  Synthetic
gatccgtgcttgattacctg

SEQ ID NO: 5916 - DNA, 20 bp, Artificial Sequence
  Synthetic
gccgcgctgtaatcggatcc

SEQ ID NO: 5917 - DNA, 20 bp, Artificial Sequence
  Synthetic
ggagagacaacggcaatgaa

SEQ ID NO: 5918 - DNA, 20 bp, Artificial Sequence
  Synthetic
gcagtttcctgaaggatgga

SEQ ID NO: 5919 - DNA, 20 bp, Artificial Sequence
  Synthetic
gtggttgagcagttgggcaa

SEQ ID NO: 5920 - DNA, 20 bp, Artificial Sequence
  Synthetic
gaaatgcgtatcacccataa

SEQ ID NO: 5921 - DNA, 20 bp, Artificial Sequence
  Synthetic
gagctgctgttaaatggctc

SEQ ID NO: 5922 - DNA, 20 bp, Artificial Sequence
  Synthetic
gagtgtctctgatttcttca

SEQ ID NO: 5923 - DNA, 20 bp, Artificial Sequence
  Synthetic
gcctctgacctggtcctcca

SEQ ID NO: 5924 - DNA, 20 bp, Artificial Sequence
  Synthetic
ggaggactgccttaagaagg

SEQ ID NO: 5925 - DNA, 20 bp, Artificial Sequence
  Synthetic
ggtgttcggtagcaaccaag

SEQ ID NO: 5926 - DNA, 20 bp, Artificial Sequence
  Synthetic
gcgagacttgggacaaagat

SEQ ID NO: 5927 - DNA, 20 bp, Artificial Sequence
  Synthetic
gaaattccactaaagacgcc

SEQ ID NO: 5928 - DNA, 20 bp, Artificial Sequence
  Synthetic
gtcatgagaacactgtggag

SEQ ID NO: 5929 - DNA, 20 bp, Artificial Sequence
  Synthetic
gcagatcatcggttactgtg

SEQ ID NO: 5930 - DNA, 20 bp, Artificial Sequence
  Synthetic
ggtagtaatgttgcaaagaa

SEQ ID NO: 5931 - DNA, 20 bp, Artificial Sequence
  Synthetic
gcaggagaacgagtaagaat

SEQ ID NO: 5932 - DNA, 20 bp, Artificial Sequence
  Synthetic
gagaaatggctgattctagg

SEQ ID NO: 5933 - DNA, 20 bp, Artificial Sequence
  Synthetic
gctgggattgtagagaacct

SEQ ID NO: 5934 - DNA, 20 bp, Artificial Sequence
  Synthetic
gtgtgggaagcaaagaaatg

SEQ ID NO: 5935 - DNA, 20 bp, Artificial Sequence
  Synthetic
gatctagccagtgattggct

SEQ ID NO: 5936 - DNA, 20 bp, Artificial Sequence
  Synthetic
gccatagagactgtcgctgc

SEQ ID NO: 5937 - DNA, 20 bp, Artificial Sequence
  Synthetic
gggacaggataagggactct

SEQ ID NO: 5938 - DNA, 20 bp, Artificial Sequence
  Synthetic
ggataagggactctcggatt

SEQ ID NO: 5939 - DNA, 20 bp, Artificial Sequence
  Synthetic
gtcacaaatcccagctctcg

SEQ ID NO: 5940 - DNA, 20 bp, Artificial Sequence
  Synthetic
gcatgttgtgtagagatcga

SEQ ID NO: 5941 - DNA, 20 bp, Artificial Sequence
  Synthetic
gaggtcacaagctattggag

SEQ ID NO: 5942 - DNA, 20 bp, Artificial Sequence
  Synthetic
gacaacagagctgagaagcc

SEQ ID NO: 5943 - DNA, 20 bp, Artificial Sequence
  Synthetic
gacagggatgagaaagagac

SEQ ID NO: 5944 - DNA, 20 bp, Artificial Sequence
  Synthetic
gccaggtcattgaccctcca

SEQ ID NO: 5945 - DNA, 20 bp, Artificial Sequence
  Synthetic
gtagggtggcagtggagagc

SEQ ID NO: 5946 - DNA, 20 bp, Artificial Sequence
  Synthetic
gctgcgatgaaaggcttgtg

SEQ ID NO: 5947 - DNA, 20 bp, Artificial Sequence
  Synthetic
gctggttagaagggaggatc

SEQ ID NO: 5948 - DNA, 20 bp, Artificial Sequence
  Synthetic
gccctgtaacatagcgtaag

SEQ ID NO: 5949 - DNA, 20 bp, Artificial Sequence
  Synthetic
gcagcttggagccagactac

SEQ ID NO: 5950 - DNA, 20 bp, Artificial Sequence
  Synthetic
gcaggaaatgccctcggagg

SEQ ID NO: 5951 - DNA, 20 bp, Artificial Sequence
  Synthetic
gaaagagagtgcgagagcaa

SEQ ID NO: 5952 - DNA, 20 bp, Artificial Sequence
  Synthetic
gaacacagtgtagaaattcg

SEQ ID NO: 5953 - DNA, 20 bp, Artificial Sequence
  Synthetic
ggcctcagccctaactccca

SEQ ID NO: 5954 - DNA, 20 bp, Artificial Sequence
  Synthetic
ggtacatttcgtgctgggct

SEQ ID NO: 5955 - DNA, 20 bp, Artificial Sequence
  Synthetic
ggaaagctacaatctttctg

SEQ ID NO: 5956 - DNA, 20 bp, Artificial Sequence
  Synthetic
ggtaactttgctccagtgtg

SEQ ID NO: 5957 - DNA, 20 bp, Artificial Sequence
  Synthetic
gactgatgtctcacaaccct

SEQ ID NO: 5958 - DNA, 20 bp, Artificial Sequence
  Synthetic
ggaatcacggatggccctgg

SEQ ID NO: 5959 - DNA, 20 bp, Artificial Sequence
  Synthetic
ggatctatgaggatagtgga

SEQ ID NO: 5960 - DNA, 20 bp, Artificial Sequence
  Synthetic
gtggtagagaaggtaggaga

SEQ ID NO: 5961 - DNA, 20 bp, Artificial Sequence
  Synthetic
gagcaaagttaccctaaagg

SEQ ID NO: 5962 - DNA, 20 bp, Artificial Sequence
  Synthetic
gccgagtggaggactctcat

SEQ ID NO: 5963 - DNA, 20 bp, Artificial Sequence
  Synthetic
gaccactcttgtgagcctag

SEQ ID NO: 5964 - DNA, 20 bp, Artificial Sequence
  Synthetic
gtcgcttctcccaggaactc

SEQ ID NO: 5965 - DNA, 20 bp, Artificial Sequence
  Synthetic
gtgggagagccacagccgat

SEQ ID NO: 5966 - DNA, 20 bp, Artificial Sequence
  Synthetic
gggcacagcaaggaattagt

SEQ ID NO: 5967 - DNA, 20 bp, Artificial Sequence
  Synthetic
gggatggtaggaaagggaca

SEQ ID NO: 5968 - DNA, 20 bp, Artificial Sequence
  Synthetic
gttcaggaagtattccggtg

SEQ ID NO: 5969 - DNA, 20 bp, Artificial Sequence
  Synthetic
gtgagctagcggcagaaggt

SEQ ID NO: 5970 - DNA, 20 bp, Artificial Sequence
  Synthetic
gcattgtgggagatggcact

SEQ ID NO: 5971 - DNA, 20 bp, Artificial Sequence
  Synthetic
gaggtttgcagccagggctg

SEQ ID NO: 5972 - DNA, 20 bp, Artificial Sequence
  Synthetic
gagaaatgcagtttaatggc

SEQ ID NO: 5973 - DNA, 20 bp, Artificial Sequence
  Synthetic
gtcattggctggcaagtgcc

SEQ ID NO: 5974 - DNA, 20 bp, Artificial Sequence
  Synthetic
gtctgggtggcttacgagga

SEQ ID NO: 5975 - DNA, 20 bp, Artificial Sequence
  Synthetic
gcatagacacagggagttgt

SEQ ID NO: 5976 - DNA, 20 bp, Artificial Sequence
  Synthetic
gaaagacagacagcgacaag

SEQ ID NO: 5977 - DNA, 20 bp, Artificial Sequence
  Synthetic
gacaacagatttggtcctgt

SEQ ID NO: 5978 - DNA, 20 bp, Artificial Sequence
  Synthetic
ggagtcacgagaagcagtgc

SEQ ID NO: 5979 - DNA, 20 bp, Artificial Sequence
  Synthetic
gatgcctccctggcttccag

SEQ ID NO: 5980 - DNA, 20 bp, Artificial Sequence
  Synthetic
gaaagataggatggaaagga

SEQ ID NO: 5981 - DNA, 20 bp, Artificial Sequence
  Synthetic
ggacagagaacccggctgtc

SEQ ID NO: 5982 - DNA, 20 bp, Artificial Sequence
  Synthetic
gtcaggcgggacagagaacc

SEQ ID NO: 5983 - DNA, 20 bp, Artificial Sequence
  Synthetic
gaggcatacctagataggga

SEQ ID NO: 5984 - DNA, 20 bp, Artificial Sequence
  Synthetic
gtacgctgctgcagatgatc

SEQ ID NO: 5985 - DNA, 20 bp, Artificial Sequence
  Synthetic
ggaagaacagagccgtgcac

SEQ ID NO: 5986 - DNA, 20 bp, Artificial Sequence
  Synthetic
gtcagaccgcagtcacttca

SEQ ID NO: 5987 - DNA, 20 bp, Artificial Sequence
  Synthetic
gccctccagcaatgtagtgg

SEQ ID NO: 5988 - DNA, 20 bp, Artificial Sequence
  Synthetic
gccctgggacaccaaagcac

SEQ ID NO: 5989 - DNA, 20 bp, Artificial Sequence
  Synthetic
gagctgtctgtactaggagg

SEQ ID NO: 5990 - DNA, 20 bp, Artificial Sequence
  Synthetic
gagccgggactggaatcact

SEQ ID NO: 5991 - DNA, 20 bp, Artificial Sequence
  Synthetic
gtgccaaatgaccacaaact

SEQ ID NO: 5992 - DNA, 20 bp, Artificial Sequence
  Synthetic
gcgcctcgcaatcaaggttc

SEQ ID NO: 5993 - DNA, 20 bp, Artificial Sequence
  Synthetic
gagaggtctgactagtgaag

SEQ ID NO: 5994 - DNA, 20 bp, Artificial Sequence
  Synthetic
gtggagttgctggcaggacc

SEQ ID NO: 5995 - DNA, 20 bp, Artificial Sequence
  Synthetic
gctgggcaccgtaaggtgag

SEQ ID NO: 5996 - DNA, 20 bp, Artificial Sequence
  Synthetic
gcctgaaaccgcttctcaag

SEQ ID NO: 5997 - DNA, 20 bp, Artificial Sequence
  Synthetic
gattctctggtcctctgtgt

SEQ ID NO: 5998 - DNA, 20 bp, Artificial Sequence
  Synthetic
gttgagaagcagggtggaca

SEQ ID NO: 5999 - DNA, 20 bp, Artificial Sequence
  Synthetic
ggtggacagacccaaagggc

SEQ ID NO: 6000 - DNA, 20 bp, Artificial Sequence
  Synthetic
gagcacacacatatttgtga

SEQ ID NO: 6001 - DNA, 20 bp, Artificial Sequence
  Synthetic
ggagttcttaagattctcct

SEQ ID NO: 6002 - DNA, 20 bp, Artificial Sequence
  Synthetic
gctagagtgtctccctctac

SEQ ID NO: 6003 - DNA, 20 bp, Artificial Sequence
  Synthetic
ggtttcaaggcatggaggcc

SEQ ID NO: 6004 - DNA, 20 bp, Artificial Sequence
  Synthetic
ggttgggagagcaggctgtt

SEQ ID NO: 6005 - DNA, 20 bp, Artificial Sequence
  Synthetic
gtgacaaatcgcagatgccg

SEQ ID NO: 6006 - DNA, 20 bp, Artificial Sequence
  Synthetic
gtgaatcactaagatgggtg

SEQ ID NO: 6007 - DNA, 20 bp, Artificial Sequence
  Synthetic
gctcgtcaacagggagaata

SEQ ID NO: 6008 - DNA, 20 bp, Artificial Sequence
  Synthetic
gacactgtaagaatgccgtt

SEQ ID NO: 6009 - DNA, 20 bp, Artificial Sequence
  Synthetic
gttacagggtttctgcctgt

SEQ ID NO: 6010 - DNA, 20 bp, Artificial Sequence
  Synthetic
gtttgcgatgtggccgaggg

SEQ ID NO: 6011 - DNA, 20 bp, Artificial Sequence
  Synthetic
gggagaataaggtttctaca

SEQ ID NO: 6012 - DNA, 20 bp, Artificial Sequence
  Synthetic
gaaaggttgtaccagggtct

SEQ ID NO: 6013 - DNA, 20 bp, Artificial Sequence
  Synthetic
gttggctttctagaatttgt

SEQ ID NO: 6014 - DNA, 20 bp, Artificial Sequence
  Synthetic
ggagtctggctttgcatctc

SEQ ID NO: 6015 - DNA, 20 bp, Artificial Sequence
  Synthetic
gggtcacctaggaaagacaa

SEQ ID NO: 6016 - DNA, 20 bp, Artificial Sequence
  Synthetic
ggtctagggactcatgtctt

SEQ ID NO: 6017 - DNA, 20 bp, Artificial Sequence
  Synthetic
gcctggtaagccagctggct

SEQ ID NO: 6018 - DNA, 20 bp, Artificial Sequence
  Synthetic
gacagatcacactgcaggct

SEQ ID NO: 6019 - DNA, 20 bp, Artificial Sequence
  Synthetic
gaagaccctgagaccttgca

SEQ ID NO: 6020 - DNA, 20 bp, Artificial Sequence
  Synthetic
gtaatataggaggccggctg

SEQ ID NO: 6021 - DNA, 20 bp, Artificial Sequence
  Synthetic
gggaggctttgcttggtgac

SEQ ID NO: 6022 - DNA, 20 bp, Artificial Sequence
  Synthetic
ggaacagagaataggcacat

SEQ ID NO: 6023 - DNA, 20 bp, Artificial Sequence
  Synthetic
ggcctatgagaagtaactgt

SEQ ID NO: 6024 - DNA, 20 bp, Artificial Sequence
  Synthetic
gtggacaagttgaagtcaga

SEQ ID NO: 6025 - DNA, 20 bp, Artificial Sequence
  Synthetic
gggaacttagaaatgagcta

SEQ ID NO: 6026 - DNA, 20 bp, Artificial Sequence
  Synthetic
gtcccacagttacttctcat

SEQ ID NO: 6027 - DNA, 20 bp, Artificial Sequence
  Synthetic
ggtagacaacagggaggcaa

SEQ ID NO: 6028 - DNA, 20 bp, Artificial Sequence
  Synthetic
gtctttctcttaactttgga

SEQ ID NO: 6029 - DNA, 20 bp, Artificial Sequence
  Synthetic
gccagtttgggaagtagtca

SEQ ID NO: 6030 - DNA, 20 bp, Artificial Sequence
  Synthetic
ggtgaaatatgacaatgcat

SEQ ID NO: 6031 - DNA, 20 bp, Artificial Sequence
  Synthetic
gacacttaggaaagcattgg

SEQ ID NO: 6032 - DNA, 20 bp, Artificial Sequence
  Synthetic
gacaaagcaacactcctgtg

SEQ ID NO: 6033 - DNA, 20 bp, Artificial Sequence
  Synthetic
gttgacacttaggaaagcat

SEQ ID NO: 6034 - DNA, 20 bp, Artificial Sequence
  Synthetic
ggtacgtcccttacagagat

SEQ ID NO: 6035 - DNA, 20 bp, Artificial Sequence
  Synthetic
gtagagctcccatctctgta

SEQ ID NO: 6036 - DNA, 20 bp, Artificial Sequence
  Synthetic
gtaagtagaaataaagggat

SEQ ID NO: 6037 - DNA, 20 bp, Artificial Sequence
  Synthetic
gtgtcttctctgcgtattcc

SEQ ID NO: 6038 - DNA, 20 bp, Artificial Sequence
  Synthetic
ggtaggaggatgtgatgacg

SEQ ID NO: 6039 - DNA, 20 bp, Artificial Sequence
  Synthetic
gggtagtccagagtccttgc

SEQ ID NO: 6040 - DNA, 20 bp, Artificial Sequence
  Synthetic
gtgttcccttaatacatgac

SEQ ID NO: 6041 - DNA, 20 bp, Artificial Sequence
  Synthetic
gttacacatgatgtaaacaa

SEQ ID NO: 6042 - DNA, 20 bp, Artificial Sequence
  Synthetic
gcaatcttctctcagatgtg

SEQ ID NO: 6043 - DNA, 20 bp, Artificial Sequence
  Synthetic
gtgaggcttgaagagagggc

SEQ ID NO: 6044 - DNA, 20 bp, Artificial Sequence
  Synthetic
ggagagagtaccagcaggtg

SEQ ID NO: 6045 - DNA, 20 bp, Artificial Sequence
  Synthetic
gctttagtgtctcagctctg

SEQ ID NO: 6046 - DNA, 20 bp, Artificial Sequence
  Synthetic
gggttgggtttctcttcaga

SEQ ID NO: 6047 - DNA, 20 bp, Artificial Sequence
  Synthetic
gaatgtgcatcgtcctcaaa

SEQ ID NO: 6048 - DNA, 20 bp, Artificial Sequence
  Synthetic
ggtaagaataaataggtcct

SEQ ID NO: 6049 - DNA, 20 bp, Artificial Sequence
  Synthetic
gactggacaagttctactat

SEQ ID NO: 6050 - DNA, 20 bp, Artificial Sequence
  Synthetic
gttcaagtcactgaacctgg

SEQ ID NO: 6051 - DNA, 20 bp, Artificial Sequence
  Synthetic
ggtagggatctgtttattta

SEQ ID NO: 6052 - DNA, 20 bp, Artificial Sequence
  Synthetic
ggtccaagatgccaggccat

SEQ ID NO: 6053 - DNA, 20 bp, Artificial Sequence
  Synthetic
gaatgaatagtgtatccacc

SEQ ID NO: 6054 - DNA, 20 bp, Artificial Sequence
  Synthetic
gcatttccgtggcccatttg

SEQ ID NO: 6055 - DNA, 20 bp, Artificial Sequence
  Synthetic
gtgccagcataataattagg

SEQ ID NO: 6056 - DNA, 20 bp, Artificial Sequence
  Synthetic
gagctgagttcgttcctgtc

SEQ ID NO: 6057 - DNA, 20 bp, Artificial Sequence
  Synthetic
gatccggcgagaaatatgag

SEQ ID NO: 6058 - DNA, 20 bp, Artificial Sequence
  Synthetic
gtgccacaggtaaggcatcc

SEQ ID NO: 6059 - DNA, 20 bp, Artificial Sequence
  Synthetic
ggagttgagagagatgaact

SEQ ID NO: 6060 - DNA, 20 bp, Artificial Sequence
  Synthetic
gctcgctgaaagcgctccac

SEQ ID NO: 6061 - DNA, 20 bp, Artificial Sequence
  Synthetic
gcagcgtccagtcaatgggc

SEQ ID NO: 6062 - DNA, 20 bp, Artificial Sequence
  Synthetic
ggcacatggcttagatggtg

SEQ ID NO: 6063 - DNA, 20 bp, Artificial Sequence
  Synthetic
gccactgtgccactgctcat

SEQ ID NO: 6064 - DNA, 20 bp, Artificial Sequence
  Synthetic
gtaattaaaggagacgcagg

SEQ ID NO: 6065 - DNA, 20 bp, Artificial Sequence
  Synthetic
gacagctagaagcctgtcag

SEQ ID NO: 6066 - DNA, 20 bp, Artificial Sequence
  Synthetic
gaactctgcagcctatgtgg

SEQ ID NO: 6067 - DNA, 20 bp, Artificial Sequence
  Synthetic
gaccatcctcggaaatgact

SEQ ID NO: 6068 - DNA, 20 bp, Artificial Sequence
  Synthetic
gagatacggaaatcacagat

SEQ ID NO: 6069 - DNA, 20 bp, Artificial Sequence
  Synthetic
ggaccagaggtgattgatgg

SEQ ID NO: 6070 - DNA, 20 bp, Artificial Sequence
  Synthetic
gtcatttccgaggatggtct

SEQ ID NO: 6071 - DNA, 20 bp, Artificial Sequence
  Synthetic
ggacaggtgttcctcagggt

SEQ ID NO: 6072 - DNA, 20 bp, Artificial Sequence
  Synthetic
gattgatggtgggaaccggc

SEQ ID NO: 6073 - DNA, 20 bp, Artificial Sequence
  Synthetic
gacaggtgttcctcagggtc

SEQ ID NO: 6074 - DNA, 20 bp, Artificial Sequence
  Synthetic
gtcccttccttcttgccagg

SEQ ID NO: 6075 - DNA, 20 bp, Artificial Sequence
  Synthetic
gttgtggcgctgagtctaga

SEQ ID NO: 6076 - DNA, 20 bp, Artificial Sequence
  Synthetic
ggtcgcatcgcgttctccca

SEQ ID NO: 6077 - DNA, 20 bp, Artificial Sequence
  Synthetic
gctaatgacatcatcctcat

SEQ ID NO: 6078 - DNA, 20 bp, Artificial Sequence
  Synthetic
ggttacgctgtacagatttg

SEQ ID NO: 6079 - DNA, 20 bp, Artificial Sequence
  Synthetic
gatttctgggtgccgagctg

SEQ ID NO: 6080 - DNA, 20 bp, Artificial Sequence
  Synthetic
gactctcagactgtcaaact

SEQ ID NO: 6081 - DNA, 20 bp, Artificial Sequence
  Synthetic
gcagcagcatgaactaggaa

SEQ ID NO: 6082 - DNA, 20 bp, Artificial Sequence
  Synthetic
gttctctcattccagaaccc

SEQ ID NO: 6083 - DNA, 20 bp, Artificial Sequence
  Synthetic
gactcagcgccacaactagc

SEQ ID NO: 6084 - DNA, 20 bp, Artificial Sequence
  Synthetic
ggcaactaactttcctcagt

SEQ ID NO: 6085 - DNA, 20 bp, Artificial Sequence
  Synthetic
gaggaaggactgagaagact

SEQ ID NO: 6086 - DNA, 20 bp, Artificial Sequence
  Synthetic
gtgtaagggatctttgttac

SEQ ID NO: 6087 - DNA, 20 bp, Artificial Sequence
  Synthetic
gtctagctgtgtgtgtgtgt

SEQ ID NO: 6088 - DNA, 20 bp, Artificial Sequence
  Synthetic
ggatggtggaagagaaagac

SEQ ID NO: 6089 - DNA, 20 bp, Artificial Sequence
  Synthetic
gaggcttggaagacttgtat

SEQ ID NO: 6090 - DNA, 20 bp, Artificial Sequence
  Synthetic
gccacttaggctgcgccttt

SEQ ID NO: 6091 - DNA, 20 bp, Artificial Sequence
  Synthetic
gtttccagatttctttccga

SEQ ID NO: 6092 - DNA, 20 bp, Artificial Sequence
  Synthetic
ggcgtggacatttcacaacc

SEQ ID NO: 6093 - DNA, 20 bp, Artificial Sequence
  Synthetic
gtctactttctcttcccaat

SEQ ID NO: 6094 - DNA, 20 bp, Artificial Sequence
  Synthetic
gtttatgaaagtgtatggag

SEQ ID NO: 6095 - DNA, 20 bp, Artificial Sequence
  Synthetic
gcgtgcccttgtgagtttgg

SEQ ID NO: 6096 - DNA, 20 bp, Artificial Sequence
  Synthetic
gccaagggaacgcagacgtt

SEQ ID NO: 6097 - DNA, 20 bp, Artificial Sequence
  Synthetic
gaagcggttcctttcttcct

SEQ ID NO: 6098 - DNA, 20 bp, Artificial Sequence
  Synthetic
gctgcaggtttcccagatga

SEQ ID NO: 6099 - DNA, 20 bp, Artificial Sequence
  Synthetic
gcggctgcacaaagttgcag

SEQ ID NO: 6100 - DNA, 20 bp, Artificial Sequence
  Synthetic
gaagagtgcattggtggagg

SEQ ID NO: 6101 - DNA, 20 bp, Artificial Sequence
  Synthetic
ggcaccctccaaactcacaa

SEQ ID NO: 6102 - DNA, 20 bp, Artificial Sequence
  Synthetic
gcttgctattcttgggcatg

SEQ ID NO: 6103 - DNA, 20 bp, Artificial Sequence
  Synthetic
gcaatctggccgctcctagt

SEQ ID NO: 6104 - DNA, 20 bp, Artificial Sequence
  Synthetic
gagagacctctgatggaaac

SEQ ID NO: 6105 - DNA, 20 bp, Artificial Sequence
  Synthetic
ggataacgtttattggatca

SEQ ID NO: 6106 - DNA, 20 bp, Artificial Sequence
  Synthetic
gcaaatataattacacagct

SEQ ID NO: 6107 - DNA, 20 bp, Artificial Sequence
  Synthetic
gaggtctctccactatgcca

SEQ ID NO: 6108 - DNA, 20 bp, Artificial Sequence
  Synthetic
gatgctccttagctatataa

SEQ ID NO: 6109 - DNA, 20 bp, Artificial Sequence
  Synthetic
gccaccaagatctctctcac

SEQ ID NO: 6110 - DNA, 20 bp, Artificial Sequence
  Synthetic
gacctctgatggaaactggc

SEQ ID NO: 6111 - DNA, 20 bp, Artificial Sequence
  Synthetic
gggaaccaaagccgctagcg

SEQ ID NO: 6112 - DNA, 20 bp, Artificial Sequence
  Synthetic
gcctttctatctgtcattta

SEQ ID NO: 6113 - DNA, 20 bp, Artificial Sequence
  Synthetic
gtctgatttctgggagttga

SEQ ID NO: 6114 - DNA, 20 bp, Artificial Sequence
  Synthetic
gcgggaaatggactatgagc

SEQ ID NO: 6115 - DNA, 20 bp, Artificial Sequence
  Synthetic
gttcatttgctggtgcaaga

SEQ ID NO: 6116 - DNA, 20 bp, Artificial Sequence
  Synthetic
gcaggtgatgcacctgtagc

SEQ ID NO: 6117 - DNA, 20 bp, Artificial Sequence
  Synthetic
gcccgttattgttgaagggt

SEQ ID NO: 6118 - DNA, 20 bp, Artificial Sequence
  Synthetic
gagggtgtccagccttcagc

SEQ ID NO: 6119 - DNA, 20 bp, Artificial Sequence
  Synthetic
gcttgttaggcaccgggtag

SEQ ID NO: 6120 - DNA, 20 bp, Artificial Sequence
  Synthetic
gcagatcaagggcctctctg

SEQ ID NO: 6121 - DNA, 20 bp, Artificial Sequence
  Synthetic
gggcaactgcaccctgtgtc

SEQ ID NO: 6122 - DNA, 20 bp, Artificial Sequence
  Synthetic
gtgcctagtgcagaaagacg

SEQ ID NO: 6123 - DNA, 20 bp, Artificial Sequence
  Synthetic
gctagtgcaaaccactttcc

SEQ ID NO: 6124 - DNA, 20 bp, Artificial Sequence
  Synthetic
gagcaactgacaggacgaga

SEQ ID NO: 6125 - DNA, 20 bp, Artificial Sequence
  Synthetic
gacttgcccaaacactattg

SEQ ID NO: 6126 - DNA, 20 bp, Artificial Sequence
  Synthetic
gactgttcaagtaagtgctt

SEQ ID NO: 6127 - DNA, 20 bp, Artificial Sequence
  Synthetic
ggagagcaggtggccaggta

SEQ ID NO: 6128 - DNA, 20 bp, Artificial Sequence
  Synthetic
ggtcccgtggcagagagaga

SEQ ID NO: 6129 - DNA, 20 bp, Artificial Sequence
  Synthetic
gagaggaaataggttgtgtt

SEQ ID NO: 6130 - DNA, 20 bp, Artificial Sequence
  Synthetic
gaccagcaagacactggcaa

SEQ ID NO: 6131 - DNA, 20 bp, Artificial Sequence
  Synthetic
gtccttgcccaggcttctta

SEQ ID NO: 6132 - DNA, 20 bp, Artificial Sequence
  Synthetic
gctttcttgggtcttgctgg

SEQ ID NO: 6133 - DNA, 20 bp, Artificial Sequence
  Synthetic
gggaagtagtggtattgtcc

SEQ ID NO: 6134 - DNA, 20 bp, Artificial Sequence
  Synthetic
gtggcacaaagccagtaata

SEQ ID NO: 6135 - DNA, 20 bp, Artificial Sequence
  Synthetic
gcgccactctgagcctgatg

SEQ ID NO: 6136 - DNA, 20 bp, Artificial Sequence
  Synthetic
ggaagcgggaataaacatgg

SEQ ID NO: 6137 - DNA, 20 bp, Artificial Sequence
  Synthetic
gggtataaatgctgtggagg

SEQ ID NO: 6138 - DNA, 20 bp, Artificial Sequence
  Synthetic
gaagagcccaaagtcagaca

SEQ ID NO: 6139 - DNA, 20 bp, Artificial Sequence
  Synthetic
gctcgagctgcctggatgaa

SEQ ID NO: 6140 - DNA, 20 bp, Artificial Sequence
  Synthetic
ggcagtcctgaggaaagagg

SEQ ID NO: 6141 - DNA, 20 bp, Artificial Sequence
  Synthetic
gacccttaagaggctccatg

SEQ ID NO: 6142 - DNA, 20 bp, Artificial Sequence
  Synthetic
gacccatgtggtagaaggag

SEQ ID NO: 6143 - DNA, 20 bp, Artificial Sequence
  Synthetic
ggatggctgagtgggctgta

SEQ ID NO: 6144 - DNA, 20 bp, Artificial Sequence
  Synthetic
gaaaccggcctggattgttt

SEQ ID NO: 6145 - DNA, 20 bp, Artificial Sequence
  Synthetic
gtgcaatggctgtcttgtcc

SEQ ID NO: 6146 - DNA, 20 bp, Artificial Sequence
  Synthetic
gactttgcagcctgagggcc

SEQ ID NO: 6147 - DNA, 20 bp, Artificial Sequence
  Synthetic
gtctggacaggacaaccctt

SEQ ID NO: 6148 - DNA, 20 bp, Artificial Sequence
  Synthetic
gcttcctcaatagcagatta

SEQ ID NO: 6149 - DNA, 20 bp, Artificial Sequence
  Synthetic
gagtgcctgtctgcaaggga

SEQ ID NO: 6150 - DNA, 20 bp, Artificial Sequence
  Synthetic
gaagcctgggatgaggaggt

SEQ ID NO: 6151 - DNA, 20 bp, Artificial Sequence
  Synthetic
gtgtcttccagacggaggtt

SEQ ID NO: 6152 - DNA, 20 bp, Artificial Sequence
  Synthetic
gcttccactggagacgttta

SEQ ID NO: 6153 - DNA, 20 bp, Artificial Sequence
  Synthetic
ggccagacagacaggtaggc

SEQ ID NO: 6154 - DNA, 20 bp, Artificial Sequence
  Synthetic
gtgctgcttgactagcccgc

SEQ ID NO: 6155 - DNA, 20 bp, Artificial Sequence
  Synthetic
gacagacgtgaacttgaggt

SEQ ID NO: 6156 - DNA, 20 bp, Artificial Sequence
  Synthetic
ggagactcagaggccgatta

SEQ ID NO: 6157 - DNA, 20 bp, Artificial Sequence
  Synthetic
gcgaagagggaaacactgtt

SEQ ID NO: 6158 - DNA, 20 bp, Artificial Sequence
  Synthetic
gggatcttgctctgccctgg

SEQ ID NO: 6159 - DNA, 20 bp, Artificial Sequence
  Synthetic
gtcaagtggctgggcagcag

SEQ ID NO: 6160 - DNA, 20 bp, Artificial Sequence
  Synthetic
gtgagtctgttgtgaatgaa

SEQ ID NO: 6161 - DNA, 20 bp, Artificial Sequence
  Synthetic
gggagactcagaggccgatt

SEQ ID NO: 6162 - DNA, 20 bp, Artificial Sequence
  Synthetic
gaaatctcgtttgctcttgc

SEQ ID NO: 6163 - DNA, 20 bp, Artificial Sequence
  Synthetic
gcaggctggacagtgatctg

SEQ ID NO: 6164 - DNA, 20 bp, Artificial Sequence
  Synthetic
gccgtcgcttgctttagtct

SEQ ID NO: 6165 - DNA, 20 bp, Artificial Sequence
  Synthetic
gacaatccctacagcaactg

SEQ ID NO: 6166 - DNA, 20 bp, Artificial Sequence
  Synthetic
gggcagccacagttgctgta

SEQ ID NO: 6167 - DNA, 20 bp, Artificial Sequence
  Synthetic
gcataaggagaagacctcaa

SEQ ID NO: 6168 - DNA, 20 bp, Artificial Sequence
  Synthetic
gatgcttgcttgtgctcagt

SEQ ID NO: 6169 - DNA, 20 bp, Artificial Sequence
  Synthetic
gccagcccttcaagaatcaa

SEQ ID NO: 6170 - DNA, 20 bp, Artificial Sequence
  Synthetic
gggaaagggagtacagtcaa

SEQ ID NO: 6171 - DNA, 20 bp, Artificial Sequence
  Synthetic
gagtcccaggatgagaaatg

SEQ ID NO: 6172 - DNA, 20 bp, Artificial Sequence
  Synthetic
ggaaggaaggtgtaacgtgg

SEQ ID NO: 6173 - DNA, 20 bp, Artificial Sequence
  Synthetic
ggtgagtgccagtcctagga

SEQ ID NO: 6174 - DNA, 20 bp, Artificial Sequence
  Synthetic
gacagtgaggtgggtggaca

SEQ ID NO: 6175 - DNA, 20 bp, Artificial Sequence
  Synthetic
gatgtcacctgcaaatgtgt

SEQ ID NO: 6176 - DNA, 20 bp, Artificial Sequence
  Synthetic
gtctgggttgagctttcctc

SEQ ID NO: 6177 - DNA, 20 bp, Artificial Sequence
  Synthetic
gcacgcttccaggagatcag

SEQ ID NO: 6178 - DNA, 20 bp, Artificial Sequence
  Synthetic
gagggtacatgcctgactct

SEQ ID NO: 6179 - DNA, 20 bp, Artificial Sequence
  Synthetic
ggcaagtagggaatgttctg

SEQ ID NO: 6180 - DNA, 20 bp, Artificial Sequence
  Synthetic
gaggcgtttcctgagaccct

SEQ ID NO: 6181 - DNA, 20 bp, Artificial Sequence
  Synthetic
gtgcacccgatgcactttca

SEQ ID NO: 6182 - DNA, 20 bp, Artificial Sequence
  Synthetic
gtgagacctagaagagcaag

SEQ ID NO: 6183 - DNA, 20 bp, Artificial Sequence
  Synthetic
gggcgagtgcttagttgtgg

SEQ ID NO: 6184 - DNA, 20 bp, Artificial Sequence
  Synthetic
gcggcgattggctactgcta

SEQ ID NO: 6185 - DNA, 20 bp, Artificial Sequence
  Synthetic
gctgatgatggcagctgatg

SEQ ID NO: 6186 - DNA, 20 bp, Artificial Sequence
  Synthetic
gccagaaggcaatctgtcac

SEQ ID NO: 6187 - DNA, 20 bp, Artificial Sequence
  Synthetic
gcttgggagaggcatatggt

SEQ ID NO: 6188 - DNA, 20 bp, Artificial Sequence
  Synthetic
ggcagcctccactcctagtg

SEQ ID NO: 6189 - DNA, 20 bp, Artificial Sequence
  Synthetic
gtcaaaggagtggctccagg

SEQ ID NO: 6190 - DNA, 20 bp, Artificial Sequence
  Synthetic
gtcctcaaataataagacac

SEQ ID NO: 6191 - DNA, 20 bp, Artificial Sequence
  Synthetic
gcactaaagtctgttgatta

SEQ ID NO: 6192 - DNA, 20 bp, Artificial Sequence
  Synthetic
gctaggttggcaaggaattg

SEQ ID NO: 6193 - DNA, 20 bp, Artificial Sequence
  Synthetic
ggacatcggtctgagggaca

SEQ ID NO: 6194 - DNA, 20 bp, Artificial Sequence
  Synthetic
gtaatacattattctcaggg

SEQ ID NO: 6195 - DNA, 20 bp, Artificial Sequence
  Synthetic
gtcttcccaaccttcttcca

SEQ ID NO: 6196 - DNA, 20 bp, Artificial Sequence
  Synthetic
gtctctgttattatctgggt

SEQ ID NO: 6197 - DNA, 20 bp, Artificial Sequence
  Synthetic
ggttcatatagggactctaa

SEQ ID NO: 6198 - DNA, 20 bp, Artificial Sequence
  Synthetic
gacctgtgtcttattatttg

SEQ ID NO: 6199 - DNA, 20 bp, Artificial Sequence
  Synthetic
gtctgagcacccaagtgtta

SEQ ID NO: 6200 - DNA, 20 bp, Artificial Sequence
  Synthetic
gcagggctccggtttagagt

SEQ ID NO: 6201 - DNA, 20 bp, Artificial Sequence
  Synthetic
gtagttactgtgtcagtaac

SEQ ID NO: 6202 - DNA, 20 bp, Artificial Sequence
  Synthetic
gtttctctttgtcatccatt

SEQ ID NO: 6203 - DNA, 20 bp, Artificial Sequence
  Synthetic
gaagcaaacagcaagcttgt

SEQ ID NO: 6204 - DNA, 20 bp, Artificial Sequence
  Synthetic
ggactccaaccctagtgcct

SEQ ID NO: 6205 - DNA, 20 bp, Artificial Sequence
  Synthetic
gtcgttcctgagtcaatgag

SEQ ID NO: 6206 - DNA, 20 bp, Artificial Sequence
  Synthetic
ggcccagtgagaaatgcaca

SEQ ID NO: 6207 - DNA, 20 bp, Artificial Sequence
  Synthetic
gagagagagagagacaaccc

SEQ ID NO: 6208 - DNA, 20 bp, Artificial Sequence
  Synthetic
ggaaacacttggcctttggg

SEQ ID NO: 6209 - DNA, 20 bp, Artificial Sequence
  Synthetic
gcaaacagaggaagctgccg

SEQ ID NO: 6210 - DNA, 20 bp, Artificial Sequence
  Synthetic
ggcgaaataggcttgagtct

SEQ ID NO: 6211 - DNA, 20 bp, Artificial Sequence
  Synthetic
gctaacagcctgtttcttct

SEQ ID NO: 6212 - DNA, 20 bp, Artificial Sequence
  Synthetic
gtcctggagcaaatacttca

SEQ ID NO: 6213 - DNA, 20 bp, Artificial Sequence
  Synthetic
gctgtgggtttgggcatgag

SEQ ID NO: 6214 - DNA, 20 bp, Artificial Sequence
  Synthetic
gcctatttcgccacctcgga

SEQ ID NO: 6215 - DNA, 20 bp, Artificial Sequence
  Synthetic
gctgaatgtattcagttagc

SEQ ID NO: 6216 - DNA, 20 bp, Artificial Sequence
  Synthetic
gggacaagagtagaatacac

SEQ ID NO: 6217 - DNA, 20 bp, Artificial Sequence
  Synthetic
gatggacaaacactctaact

SEQ ID NO: 6218 - DNA, 20 bp, Artificial Sequence
  Synthetic
gcggaggatgctctcaaagt

SEQ ID NO: 6219 - DNA, 20 bp, Artificial Sequence
  Synthetic
ggatggacaaacactctaac

SEQ ID NO: 6220 - DNA, 20 bp, Artificial Sequence
  Synthetic
gtgctgataaacacccactt

SEQ ID NO: 6221 - DNA, 20 bp, Artificial Sequence
  Synthetic
gttgattggactctttctta

SEQ ID NO: 6222 - DNA, 20 bp, Artificial Sequence
  Synthetic
gtctgtcctccacacaaccc

SEQ ID NO: 6223 - DNA, 20 bp, Artificial Sequence
  Synthetic
gagcatcctccgcggttgat

SEQ ID NO: 6224 - DNA, 20 bp, Artificial Sequence
  Synthetic
gtccttccctctgcccttgt

SEQ ID NO: 6225 - DNA, 20 bp, Artificial Sequence
  Synthetic
gggagaacccatttcctccc

SEQ ID NO: 6226 - DNA, 20 bp, Artificial Sequence
  Synthetic
gctctggattctctcaagga

SEQ ID NO: 6227 - DNA, 20 bp, Artificial Sequence
  Synthetic
gcaacatcctgttgacgtaa

SEQ ID NO: 6228 - DNA, 20 bp, Artificial Sequence
  Synthetic
gctatgtgaattccagaaag

SEQ ID NO: 6229 - DNA, 20 bp, Artificial Sequence
  Synthetic
gcttgcttacacgttgcccg

SEQ ID NO: 6230 - DNA, 20 bp, Artificial Sequence
  Synthetic
gtaagcaagcatcgtcctcc

SEQ ID NO: 6231 - DNA, 20 bp, Artificial Sequence
  Synthetic
ggcgtgctttgaaacaagac

SEQ ID NO: 6232 - DNA, 20 bp, Artificial Sequence
  Synthetic
gcgtgctttgaaacaagaca

SEQ ID NO: 6233 - DNA, 20 bp, Artificial Sequence
  Synthetic
ggtgtcccatagtaatttac

SEQ ID NO: 6234 - DNA, 20 bp, Artificial Sequence
  Synthetic
ggatgttgccaaggagcgaa

SEQ ID NO: 6235 - DNA, 20 bp, Artificial Sequence
  Synthetic
gacaataaaggagacagaaa

SEQ ID NO: 6236 - DNA, 20 bp, Artificial Sequence
  Synthetic
gaatacccagactatgataa

SEQ ID NO: 6237 - DNA, 20 bp, Artificial Sequence
  Synthetic
gtctggcataataggaggct

SEQ ID NO: 6238 - DNA, 20 bp, Artificial Sequence
  Synthetic
gtggctgacacaggaaatgg

SEQ ID NO: 6239 - DNA, 20 bp, Artificial Sequence
  Synthetic
ggtttgacccacacacgcta

SEQ ID NO: 6240 - DNA, 20 bp, Artificial Sequence
  Synthetic
ggatgctgagatgctcctga

SEQ ID NO: 6241 - DNA, 20 bp, Artificial Sequence
  Synthetic
ggtgcttctgtaggcacggt

SEQ ID NO: 6242 - DNA, 20 bp, Artificial Sequence
  Synthetic
ggccaatggatagttgagcc

SEQ ID NO: 6243 - DNA, 20 bp, Artificial Sequence
  Synthetic
ggagacttccaagaggagcc

SEQ ID NO: 6244 - DNA, 20 bp, Artificial Sequence
  Synthetic
gtgggtgcatgcttcaaagg

SEQ ID NO: 6245 - DNA, 20 bp, Artificial Sequence
  Synthetic
gctgggaaatgctcatgtca

SEQ ID NO: 6246 - DNA, 20 bp, Artificial Sequence
  Synthetic
ggtcagtgtagatagacgag

SEQ ID NO: 6247 - DNA, 20 bp, Artificial Sequence
  Synthetic
ggacgattgggccagagacg

SEQ ID NO: 6248 - DNA, 20 bp, Artificial Sequence
  Synthetic
gcccacattccctatcgttc

SEQ ID NO: 6249 - DNA, 20 bp, Artificial Sequence
  Synthetic
gttggttccataattcctga

SEQ ID NO: 6250 - DNA, 20 bp, Artificial Sequence
  Synthetic
gcacatgagttacttaggaa

SEQ ID NO: 6251 - DNA, 20 bp, Artificial Sequence
  Synthetic
gagacatgtgtgtcaggagg

SEQ ID NO: 6252 - DNA, 20 bp, Artificial Sequence
  Synthetic
gagtcaggacaggtgagtgg

SEQ ID NO: 6253 - DNA, 20 bp, Artificial Sequence
  Synthetic
gaatgtgggcaggtgagtgg

SEQ ID NO: 6254 - DNA, 20 bp, Artificial Sequence
  Synthetic
gtggactggagaatatagac

SEQ ID NO: 6255 - DNA, 20 bp, Artificial Sequence
  Synthetic
gcctttatgggcggtgctag

SEQ ID NO: 6256 - DNA, 20 bp, Artificial Sequence
  Synthetic
gcctttcagttagcataaat

SEQ ID NO: 6257 - DNA, 20 bp, Artificial Sequence
  Synthetic
gctgggaactgagctgtgta

SEQ ID NO: 6258 - DNA, 20 bp, Artificial Sequence
  Synthetic
gccctctgaatgctgtctgt

SEQ ID NO: 6259 - DNA, 20 bp, Artificial Sequence
  Synthetic
gtcctgtagctggacaggct

SEQ ID NO: 6260 - DNA, 20 bp, Artificial Sequence
  Synthetic
gaggaagacaacatgggatg

SEQ ID NO: 6261 - DNA, 20 bp, Artificial Sequence
  Synthetic
gacgtcgtgagatgtcaaag

SEQ ID NO: 6262 - DNA, 20 bp, Artificial Sequence
  Synthetic
ggtctacctagcttacagcc

SEQ ID NO: 6263 - DNA, 20 bp, Artificial Sequence
  Synthetic
ggtttgtgccaggcctttat

SEQ ID NO: 6264 - DNA, 20 bp, Artificial Sequence
  Synthetic
ggtgctttcggagatgccaa

SEQ ID NO: 6265 - DNA, 20 bp, Artificial Sequence
  Synthetic
gatactccagaagactgtca

SEQ ID NO: 6266 - DNA, 20 bp, Artificial Sequence
  Synthetic
gttcttcctagaaggtctcc

SEQ ID NO: 6267 - DNA, 20 bp, Artificial Sequence
  Synthetic
ggcacttaatgatatttctg

SEQ ID NO: 6268 - DNA, 20 bp, Artificial Sequence
  Synthetic
ggctctctacgatctaaaga

SEQ ID NO: 6269 - DNA, 20 bp, Artificial Sequence
  Synthetic
gactgatgctgtctggcctt

SEQ ID NO: 6270 - DNA, 20 bp, Artificial Sequence
  Synthetic
gaacatttgatgccatcaaa

SEQ ID NO: 6271 - DNA, 20 bp, Artificial Sequence
  Synthetic
gctacaggtttctagaacaa

SEQ ID NO: 6272 - DNA, 20 bp, Artificial Sequence
  Synthetic
gtgctaatctgtatccagtt

SEQ ID NO: 6273 - DNA, 20 bp, Artificial Sequence
  Synthetic
gcagtggcacctgtaatccc

SEQ ID NO: 6274 - DNA, 20 bp, Artificial Sequence
  Synthetic
gtcagcaatgaatggatgat

SEQ ID NO: 6275 - DNA, 20 bp, Artificial Sequence
  Synthetic
gggaacaatgagggacaatc

SEQ ID NO: 6276 - DNA, 20 bp, Artificial Sequence
  Synthetic
ggtcttcagggtgtcagagg

SEQ ID NO: 6277 - DNA, 20 bp, Artificial Sequence
  Synthetic
ggatgggtggttgggttctg

SEQ ID NO: 6278 - DNA, 20 bp, Artificial Sequence
  Synthetic
ggacttgcctcccagaggga

SEQ ID NO: 6279 - DNA, 20 bp, Artificial Sequence
  Synthetic
gttaagccttgctacttact

SEQ ID NO: 6280 - DNA, 20 bp, Artificial Sequence
  Synthetic
gtctttctggcagtagcaag

SEQ ID NO: 6281 - DNA, 20 bp, Artificial Sequence
  Synthetic
gggaagtagagacaagccct

SEQ ID NO: 6282 - DNA, 20 bp, Artificial Sequence
  Synthetic
ggacacccataactgataca

SEQ ID NO: 6283 - DNA, 20 bp, Artificial Sequence
  Synthetic
gctgtctgttgaggaactgc

SEQ ID NO: 6284 - DNA, 20 bp, Artificial Sequence
  Synthetic
gccctctccaacctcaagaa

SEQ ID NO: 6285 - DNA, 20 bp, Artificial Sequence
  Synthetic
gtctgtgagaaagtgtgtct

SEQ ID NO: 6286 - DNA, 20 bp, Artificial Sequence
  Synthetic
gccagtcagaaaggtgaaac

SEQ ID NO: 6287 - DNA, 20 bp, Artificial Sequence
  Synthetic
ggattcttgcaagtttgcga

SEQ ID NO: 6288 - DNA, 20 bp, Artificial Sequence
  Synthetic
gtggactttatcagcttact

SEQ ID NO: 6289 - DNA, 20 bp, Artificial Sequence
  Synthetic
gcccactgcccagataattc

SEQ ID NO: 6290 - DNA, 20 bp, Artificial Sequence
  Synthetic
gccactttctagtgagatgg

SEQ ID NO: 6291 - DNA, 20 bp, Artificial Sequence
  Synthetic
gcccagataattctggattc

SEQ ID NO: 6292 - DNA, 20 bp, Artificial Sequence
  Synthetic
ggttatatattcttcttgca

SEQ ID NO: 6293 - DNA, 20 bp, Artificial Sequence
  Synthetic
gcctggtaatgtgtgtacca

SEQ ID NO: 6294 - DNA, 20 bp, Artificial Sequence
  Synthetic
gttagtttctcccagcagga

SEQ ID NO: 6295 - DNA, 20 bp, Artificial Sequence
  Synthetic
gtaagccataacagtttccc

SEQ ID NO: 6296 - DNA, 20 bp, Artificial Sequence
  Synthetic
gctgtcacagccatgttcat

SEQ ID NO: 6297 - DNA, 20 bp, Artificial Sequence
  Synthetic
gatgtgcatagcctgggagt

SEQ ID NO: 6298 - DNA, 20 bp, Artificial Sequence
  Synthetic
gcaatttgtgtgtggaaagg

SEQ ID NO: 6299 - DNA, 20 bp, Artificial Sequence
  Synthetic
gtcatcttcttagctcactg

SEQ ID NO: 6300 - DNA, 20 bp, Artificial Sequence
  Synthetic
ggtatctgtcactgagggat

SEQ ID NO: 6301 - DNA, 20 bp, Artificial Sequence
  Synthetic
gtttctcccagcaggagggc

SEQ ID NO: 6302 - DNA, 20 bp, Artificial Sequence
  Synthetic
gaagaacaatcccatgaaca

SEQ ID NO: 6303 - DNA, 20 bp, Artificial Sequence
  Synthetic
ggagggcaagggagctgaag

SEQ ID NO: 6304 - DNA, 20 bp, Artificial Sequence
  Synthetic
gcttcacttatttgagatca

SEQ ID NO: 6305 - DNA, 20 bp, Artificial Sequence
  Synthetic
gggaagggtcacactgaacg

SEQ ID NO: 6306 - DNA, 20 bp, Artificial Sequence
  Synthetic
ggagcagaggaatttaccta

SEQ ID NO: 6307 - DNA, 20 bp, Artificial Sequence
  Synthetic
gccactcatgagtctctgtc

SEQ ID NO: 6308 - DNA, 20 bp, Artificial Sequence
  Synthetic
ggtgaggagcacagaggtac

SEQ ID NO: 6309 - DNA, 20 bp, Artificial Sequence
  Synthetic
ggtcttgagaaagtatccaa

SEQ ID NO: 6310 - DNA, 20 bp, Artificial Sequence
  Synthetic
gtgaggagcacagaggtaca

SEQ ID NO: 6311 - DNA, 20 bp, Artificial Sequence
  Synthetic
gaagcataacaaccaagagt

SEQ ID NO: 6312 - DNA, 20 bp, Artificial Sequence
  Synthetic
gatggaagtgatcatcagga

SEQ ID NO: 6313 - DNA, 20 bp, Artificial Sequence
  Synthetic
gccagcaaaccatgcagcct

SEQ ID NO: 6314 - DNA, 20 bp, Artificial Sequence
  Synthetic
gccaggaagtttcttcaaca

SEQ ID NO: 6315 - DNA, 20 bp, Artificial Sequence
  Synthetic
ggtcatcgaaagatagtttg

SEQ ID NO: 6316 - DNA, 20 bp, Artificial Sequence
  Synthetic
gtcaacaataaagtacagtt

SEQ ID NO: 6317 - DNA, 20 bp, Artificial Sequence
  Synthetic
ggcagcgagcctttcatctc

SEQ ID NO: 6318 - DNA, 20 bp, Artificial Sequence
  Synthetic
gaggaacatatgtctccaga

SEQ ID NO: 6319 - DNA, 20 bp, Artificial Sequence
  Synthetic
gattacccaatacatagtac

SEQ ID NO: 6320 - DNA, 20 bp, Artificial Sequence
  Synthetic
gaaaccgtatttagaatagg

SEQ ID NO: 6321 - DNA, 20 bp, Artificial Sequence
  Synthetic
gtggaggagccacatggaca

SEQ ID NO: 6322 - DNA, 20 bp, Artificial Sequence
  Synthetic
ggtcagtctagtattgggct

SEQ ID NO: 6323 - DNA, 20 bp, Artificial Sequence
  Synthetic
gatgttaacaggtggagata

SEQ ID NO: 6324 - DNA, 20 bp, Artificial Sequence
  Synthetic
ggagcaatcacataaagcaa

SEQ ID NO: 6325 - DNA, 20 bp, Artificial Sequence
  Synthetic
gatttgagcagtgtgtcctg

SEQ ID NO: 6326 - DNA, 20 bp, Artificial Sequence
  Synthetic
gactgtcgtattgcgaaact

SEQ ID NO: 6327 - DNA, 20 bp, Artificial Sequence
  Synthetic
gttacgatttgtgcccggcc

SEQ ID NO: 6328 - DNA, 20 bp, Artificial Sequence
  Synthetic
gcaccgccgtactctacact

SEQ ID NO: 6329 - DNA, 20 bp, Artificial Sequence
  Synthetic
gggcgcacgatgtcgtatag

SEQ ID NO: 6330 - DNA, 20 bp, Artificial Sequence
  Synthetic
gggtgcaaagtaacgcggcc

SEQ ID NO: 6331 - DNA, 20 bp, Artificial Sequence
  Synthetic
gtccgaggagtacgaagggt

SEQ ID NO: 6332 - DNA, 20 bp, Artificial Sequence
  Synthetic
gtcaagtggactgcgagggt

SEQ ID NO: 6333 - DNA, 20 bp, Artificial Sequence
  Synthetic
ggttacgggcggagagggat

SEQ ID NO: 6334 - DNA, 20 bp, Artificial Sequence
  Synthetic
gcggtataactaccaagggt

SEQ ID NO: 6335 - DNA, 20 bp, Artificial Sequence
  Synthetic
gcgccagcgatgttgagggt

SEQ ID NO: 6336 - DNA, 20 bp, Artificial Sequence
  Synthetic
gaaacagggtgcctggctga

SEQ ID NO: 6337 - DNA, 20 bp, Artificial Sequence
  Synthetic
ggagagaactgaggcacact

SEQ ID NO: 6338 - DNA, 20 bp, Artificial Sequence
  Synthetic
gacttcttgaaacctgtttg

SEQ ID NO: 6339 - DNA, 20 bp, Artificial Sequence
  Synthetic
ggcttgtctgtaaaggttct

SEQ ID NO: 6340 - DNA, 20 bp, Artificial Sequence
  Synthetic
ggcggaaatccagacgggag

SEQ ID NO: 6341 - DNA, 20 bp, Artificial Sequence
  Synthetic
gcacactccactccactcca

SEQ ID NO: 6342 - DNA, 20 bp, Artificial Sequence
  Synthetic
ggttctcacacccttcagcc

SEQ ID NO: 6343 - DNA, 20 bp, Artificial Sequence
  Synthetic
ggtgaagggccagaagacca

SEQ ID NO: 6344 - DNA, 20 bp, Artificial Sequence
  Synthetic
gaaggtaggtagcacagctc

SEQ ID NO: 6345 - DNA, 20 bp, Artificial Sequence
  Synthetic
gcatagaacctggctgggta

SEQ ID NO: 6346 - DNA, 20 bp, Artificial Sequence
  Synthetic
gctgggcattcagaacacat

SEQ ID NO: 6347 - DNA, 20 bp, Artificial Sequence
  Synthetic
ggctcctgatgggcagttcg

SEQ ID NO: 6348 - DNA, 20 bp, Artificial Sequence
  Synthetic
gcttcaatatgccttgccca

SEQ ID NO: 6349 - DNA, 20 bp, Artificial Sequence
  Synthetic
gggacttcacaaggaagctg

SEQ ID NO: 6350 - DNA, 20 bp, Artificial Sequence
  Synthetic
gctgaagggagagctctcac

SEQ ID NO: 6351 - DNA, 20 bp, Artificial Sequence
  Synthetic
gattggcgtgggttcagaca

SEQ ID NO: 6352 - DNA, 20 bp, Artificial Sequence
  Synthetic
gaaggttagcagcccgggaa

SEQ ID NO: 6353 - DNA, 20 bp, Artificial Sequence
  Synthetic
gctgggaattctcccacagg

SEQ ID NO: 6354 - DNA, 20 bp, Artificial Sequence
  Synthetic
gcagcagcctcctggagaaa

SEQ ID NO: 6355 - DNA, 20 bp, Artificial Sequence
  Synthetic
gggaaggacactgacacaca

SEQ ID NO: 6356 - DNA, 20 bp, Artificial Sequence
  Synthetic
ggcaaagaaggcgggaacgg

SEQ ID NO: 6357 - DNA, 20 bp, Artificial Sequence
  Synthetic
gacctttcagatttcggagg

SEQ ID NO: 6358 - DNA, 20 bp, Artificial Sequence
  Synthetic
gtagactccgctgcgctgga

SEQ ID NO: 6359 - DNA, 20 bp, Artificial Sequence
  Synthetic
gagtttggcctggactgggt

SEQ ID NO: 6360 - DNA, 20 bp, Artificial Sequence
  Synthetic
gatggtcacgactccagaag

SEQ ID NO: 6361 - DNA, 20 bp, Artificial Sequence
  Synthetic
gaagaaagggttgaagggag

SEQ ID NO: 6362 - DNA, 20 bp, Artificial Sequence
  Synthetic
gcatctggtggagagaaagg

SEQ ID NO: 6363 - DNA, 20 bp, Artificial Sequence
  Synthetic
gcgtagcgcaaggcatctca

SEQ ID NO: 6364 - DNA, 20 bp, Artificial Sequence
  Synthetic
gggtgtgagggagaaagccc

SEQ ID NO: 6365 - DNA, 20 bp, Artificial Sequence
  Synthetic
gtgatatcctggaggtcaga

SEQ ID NO: 6366 - DNA, 20 bp, Artificial Sequence
  Synthetic
gagcttgtggttattactgc

SEQ ID NO: 6367 - DNA, 20 bp, Artificial Sequence
  Synthetic
gtcctgtgggactggaacct

SEQ ID NO: 6368 - DNA, 20 bp, Artificial Sequence
  Synthetic
gactaacacttcagtgaggc

SEQ ID NO: 6369 - DNA, 20 bp, Artificial Sequence
  Synthetic
gtggctgaagcagtgcatgc

SEQ ID NO: 6370 - DNA, 20 bp, Artificial Sequence
  Synthetic
gtcagccacaggttggagct

SEQ ID NO: 6371 - DNA, 20 bp, Artificial Sequence
  Synthetic
gtgggaggtttgacaggagg

SEQ ID NO: 6372 - DNA, 20 bp, Artificial Sequence
  Synthetic
gattaagggaagattcaaac

SEQ ID NO: 6373 - DNA, 20 bp, Artificial Sequence
  Synthetic
gaatcctgcatctctgaggc

SEQ ID NO: 6374 - DNA, 20 bp, Artificial Sequence
  Synthetic
gagccagtcaggaccattgt

SEQ ID NO: 6375 - DNA, 20 bp, Artificial Sequence
  Synthetic
ggctacatacagtctaggtt

SEQ ID NO: 6376 - DNA, 20 bp, Artificial Sequence
  Synthetic
gaggaatcgagaacttaatt

SEQ ID NO: 6377 - DNA, 20 bp, Artificial Sequence
  Synthetic
ggaatgtagcccaggagagg

SEQ ID NO: 6378 - DNA, 20 bp, Artificial Sequence
  Synthetic
ggctgtcctgtgttctcatg

SEQ ID NO: 6379 - DNA, 20 bp, Artificial Sequence
  Synthetic
ggtgaaggagaaatggaggc

SEQ ID NO: 6380 - DNA, 20 bp, Artificial Sequence
  Synthetic
gacagccggtcaaactggga

SEQ ID NO: 6381 - DNA, 20 bp, Artificial Sequence
  Synthetic
gctcaggctacatacagtct

SEQ ID NO: 6382 - DNA, 20 bp, Artificial Sequence
  Synthetic
gttcactttgtcccagattt

SEQ ID NO: 6383 - DNA, 20 bp, Artificial Sequence
  Synthetic
gtttctggtagtttgccacc

SEQ ID NO: 6384 - DNA, 20 bp, Artificial Sequence
  Synthetic
ggaggtgtccaatagccagg

SEQ ID NO: 6385 - DNA, 20 bp, Artificial Sequence
  Synthetic
gctttgaccctcgatggagg

SEQ ID NO: 6386 - DNA, 20 bp, Artificial Sequence
  Synthetic
gtcttacatgacgtatcgga

SEQ ID NO: 6387 - DNA, 20 bp, Artificial Sequence
  Synthetic
ggatgcagggacaagggttt

SEQ ID NO: 6388 - DNA, 20 bp, Artificial Sequence
  Synthetic
ggtcctcgcgcttacctgaa

SEQ ID NO: 6389 - DNA, 20 bp, Artificial Sequence
  Synthetic
gatgcagggacaagggtttg

SEQ ID NO: 6390 - DNA, 20 bp, Artificial Sequence
  Synthetic
gggtccacaggacagtgtca

SEQ ID NO: 6391 - DNA, 20 bp, Artificial Sequence
  Synthetic
gggtcaaagctcagtgagag

SEQ ID NO: 6392 - DNA, 20 bp, Artificial Sequence
  Synthetic
gggatgcagggacaagggtt

SEQ ID NO: 6393 - DNA, 20 bp, Artificial Sequence
  Synthetic
gaactagcttgatattccca

SEQ ID NO: 6394 - DNA, 20 bp, Artificial Sequence
  Synthetic
gcaacacatgtgagttatac

SEQ ID NO: 6395 - DNA, 20 bp, Artificial Sequence
  Synthetic
gtcaacgctatcaatggcaa

SEQ ID NO: 6396 - DNA, 20 bp, Artificial Sequence
  Synthetic
gagttatacaggttgatctc

SEQ ID NO: 6397 - DNA, 20 bp, Artificial Sequence
  Synthetic
gtataactcacatgtgttgc

SEQ ID NO: 6398 - DNA, 20 bp, Artificial Sequence
  Synthetic
gccattgatagcgttgacat

SEQ ID NO: 6399 - DNA, 20 bp, Artificial Sequence
  Synthetic
gacatcaagagcagggctgt

SEQ ID NO: 6400 - DNA, 20 bp, Artificial Sequence
  Synthetic
gctaaggcagcccagacacc

SEQ ID NO: 6401 - DNA, 20 bp, Artificial Sequence
  Synthetic
gattacatgccattaagctc

SEQ ID NO: 6402 - DNA, 20 bp, Artificial Sequence
  Synthetic
ggagttcctgctgacgtgtg

SEQ ID NO: 6403 - DNA, 20 bp, Artificial Sequence
  Synthetic
gacttgctctgctgcatgtc

SEQ ID NO: 6404 - DNA, 20 bp, Artificial Sequence
  Synthetic
gaccacatcagaggttagtt

SEQ ID NO: 6405 - DNA, 20 bp, Artificial Sequence
  Synthetic
gcttggccgtgtatgcacgg

SEQ ID NO: 6406 - DNA, 20 bp, Artificial Sequence
  Synthetic
gtaatgtgacctgtggacac

SEQ ID NO: 6407 - DNA, 20 bp, Artificial Sequence
  Synthetic
gtcgggatagtggtggcgat

SEQ ID NO: 6408 - DNA, 20 bp, Artificial Sequence
  Synthetic
gttagggaacaatggaaacc

SEQ ID NO: 6409 - DNA, 20 bp, Artificial Sequence
  Synthetic
gagattattggcgggagcgg

SEQ ID NO: 6410 - DNA, 20 bp, Artificial Sequence
  Synthetic
gagtcacgggctgcactaac

SEQ ID NO: 6411 - DNA, 20 bp, Artificial Sequence
  Synthetic
gtttaccaagtggtttagga

SEQ ID NO: 6412 - DNA, 20 bp, Artificial Sequence
  Synthetic
ggtgtagaaagcatatcaca

SEQ ID NO: 6413 - DNA, 20 bp, Artificial Sequence
  Synthetic
gcctggagttggattcttcc

SEQ ID NO: 6414 - DNA, 20 bp, Artificial Sequence
  Synthetic
ggctccattgctcttaggcc

SEQ ID NO: 6415 - DNA, 20 bp, Artificial Sequence
  Synthetic
gtctgacaggcactatgaca

SEQ ID NO: 6416 - DNA, 20 bp, Artificial Sequence
  Synthetic
gaaacctacaagtcagtttc

SEQ ID NO: 6417 - DNA, 20 bp, Artificial Sequence
  Synthetic
ggcacacagaggcctctgtg

SEQ ID NO: 6418 - DNA, 20 bp, Artificial Sequence
  Synthetic
gggagagggtgaagactacc

SEQ ID NO: 6419 - DNA, 20 bp, Artificial Sequence
  Synthetic
gttgtgtctgagccgagcgg

SEQ ID NO: 6420 - DNA, 20 bp, Artificial Sequence
  Synthetic
gatgaaacagtacctagaac

SEQ ID NO: 6421 - DNA, 20 bp, Artificial Sequence
  Synthetic
ggaaagtaccaggctcggga

SEQ ID NO: 6422 - DNA, 20 bp, Artificial Sequence
  Synthetic
ggcttgtagtggtggctctg

SEQ ID NO: 6423 - DNA, 20 bp, Artificial Sequence
  Synthetic
gcagccagcttgcaggatgt

SEQ ID NO: 6424 - DNA, 20 bp, Artificial Sequence
  Synthetic
gcagggaggatcagcaggta

SEQ ID NO: 6425 - DNA, 20 bp, Artificial Sequence
  Synthetic
gtcgtgcgggagcaaatgaa

SEQ ID NO: 6426 - DNA, 20 bp, Artificial Sequence
  Synthetic
ggaaagcaaagggccgggaa

SEQ ID NO: 6427 - DNA, 20 bp, Artificial Sequence
  Synthetic
gaaagcaaagggccgggaag

SEQ ID NO: 6428 - DNA, 20 bp, Artificial Sequence
  Synthetic
gagcagatcccttagtccgc

SEQ ID NO: 6429 - DNA, 20 bp, Artificial Sequence
  Synthetic
gcccactaggaactgcctca

SEQ ID NO: 6430 - DNA, 20 bp, Artificial Sequence
  Synthetic
ggtctggcttctactgccgt

SEQ ID NO: 6431 - DNA, 20 bp, Artificial Sequence
  Synthetic
ggaaggatgggtgtgtgtat

SEQ ID NO: 6432 - DNA, 20 bp, Artificial Sequence
  Synthetic
gctccagtctgcaggtgagt

SEQ ID NO: 6433 - DNA, 20 bp, Artificial Sequence
  Synthetic
gggcagatgtaggcttccca

SEQ ID NO: 6434 - DNA, 20 bp, Artificial Sequence
  Synthetic
gtcttggtcatcgtgacaga

SEQ ID NO: 6435 - DNA, 20 bp, Artificial Sequence
  Synthetic
gagtttggcctgcagttcca

SEQ ID NO: 6436 - DNA, 20 bp, Artificial Sequence
  Synthetic
gctcccttcctcccatggtg

SEQ ID NO: 6437 - DNA, 20 bp, Artificial Sequence
  Synthetic
gagagagtggccagcagcag

SEQ ID NO: 6438 - DNA, 20 bp, Artificial Sequence
  Synthetic
gcatctgcattgcctgagct

SEQ ID NO: 6439 - DNA, 20 bp, Artificial Sequence
  Synthetic
gtgacgtcatgctggccgag

SEQ ID NO: 6440 - DNA, 20 bp, Artificial Sequence
  Synthetic
gatattccacatcatagacc

SEQ ID NO: 6441 - DNA, 20 bp, Artificial Sequence
  Synthetic
gagagcgccgcttaaagccg

SEQ ID NO: 6442 - DNA, 20 bp, Artificial Sequence
  Synthetic
gagattggccgagataccca

SEQ ID NO: 6443 - DNA, 20 bp, Artificial Sequence
  Synthetic
gcattagtatgcagtatgca

SEQ ID NO: 6444 - DNA, 20 bp, Artificial Sequence
  Synthetic
gcctcaggccgtgggtatct

SEQ ID NO: 6445 - DNA, 20 bp, Artificial Sequence
  Synthetic
gctctcaaggactctggagg

SEQ ID NO: 6446 - DNA, 20 bp, Artificial Sequence
  Synthetic
gcatactaatgctgagagaa

SEQ ID NO: 6447 - DNA, 20 bp, Artificial Sequence
  Synthetic
gctgcctccactatgccaga

SEQ ID NO: 6448 - DNA, 20 bp, Artificial Sequence
  Synthetic
gctgaaacctcctgtggccc

SEQ ID NO: 6449 - DNA, 20 bp, Artificial Sequence
  Synthetic
gctgcatccgacaggcctta

SEQ ID NO: 6450 - DNA, 20 bp, Artificial Sequence
  Synthetic
ggccttgaaggagatgttca

SEQ ID NO: 6451 - DNA, 20 bp, Artificial Sequence
  Synthetic
gaaactgaaatgagtgggag

SEQ ID NO: 6452 - DNA, 20 bp, Artificial Sequence
  Synthetic
gttcatgtgaggaccaatga

SEQ ID NO: 6453 - DNA, 20 bp, Artificial Sequence
  Synthetic
gatgggaagagcctgaactc

SEQ ID NO: 6454 - DNA, 20 bp, Artificial Sequence
  Synthetic
gcgcagccggatctaggttg

SEQ ID NO: 6455 - DNA, 20 bp, Artificial Sequence
  Synthetic
gagaaactgaaatgagtggg

SEQ ID NO: 6456 - DNA, 20 bp, Artificial Sequence
  Synthetic
gacgtcacgtcaaagggaat

SEQ ID NO: 6457 - DNA, 20 bp, Artificial Sequence
  Synthetic
gtaccagtgggcagagcctc

SEQ ID NO: 6458 - DNA, 20 bp, Artificial Sequence
  Synthetic
gttggtttgcgttgagacaa

SEQ ID NO: 6459 - DNA, 20 bp, Artificial Sequence
  Synthetic
ggctgctaacttcccactcc

SEQ ID NO: 6460 - DNA, 20 bp, Artificial Sequence
  Synthetic
ggtgtgtgtgtgtgtgtgac

SEQ ID NO: 6461 - DNA, 20 bp, Artificial Sequence
  Synthetic
gacagtacatggtgcatcca

SEQ ID NO: 6462 - DNA, 20 bp, Artificial Sequence
  Synthetic
gacatatccagtgcccttat

SEQ ID NO: 6463 - DNA, 20 bp, Artificial Sequence
  Synthetic
gacaagggcctgctatgcag

SEQ ID NO: 6464 - DNA, 20 bp, Artificial Sequence
  Synthetic
gatctcagcgccgtgcggaa

SEQ ID NO: 6465 - DNA, 20 bp, Artificial Sequence
  Synthetic
ggagccgcacattccagcac

SEQ ID NO: 6466 - DNA, 20 bp, Artificial Sequence
  Synthetic
gcataaagatctgtgtaggc

SEQ ID NO: 6467 - DNA, 20 bp, Artificial Sequence
  Synthetic
gcgtcctgtgctggaatgtg

SEQ ID NO: 6468 - DNA, 20 bp, Artificial Sequence
  Synthetic
gaggttcacacatttagatc

SEQ ID NO: 6469 - DNA, 20 bp, Artificial Sequence
  Synthetic
gaaatagtaacaaagtagcc

SEQ ID NO: 6470 - DNA, 20 bp, Artificial Sequence
  Synthetic
ggaaacttacctaatccgcc

SEQ ID NO: 6471 - DNA, 20 bp, Artificial Sequence
  Synthetic
gacaatacttctcaagaggg

SEQ ID NO: 6472 - DNA, 20 bp, Artificial Sequence
  Synthetic
gtacctgacgtcttataatg

SEQ ID NO: 6473 - DNA, 20 bp, Artificial Sequence
  Synthetic
gaggctggaagcagagcttc

SEQ ID NO: 6474 - DNA, 20 bp, Artificial Sequence
  Synthetic
gactgcatttgtttgacatt

SEQ ID NO: 6475 - DNA, 20 bp, Artificial Sequence
  Synthetic
gaagtacaaccaagtcttct

SEQ ID NO: 6476 - DNA, 20 bp, Artificial Sequence
  Synthetic
gcagccctgagaattacaag

SEQ ID NO: 6477 - DNA, 20 bp, Artificial Sequence
  Synthetic
gctgcaactgacctatctct

SEQ ID NO: 6478 - DNA, 20 bp, Artificial Sequence
  Synthetic
gctctcttgcacaggtccac

SEQ ID NO: 6479 - DNA, 20 bp, Artificial Sequence
  Synthetic
ggcgtgtgacgtagtagggt

SEQ ID NO: 6480 - DNA, 20 bp, Artificial Sequence
  Synthetic
ggccacagatagagcctgta

SEQ ID NO: 6481 - DNA, 20 bp, Artificial Sequence
  Synthetic
gtgacaggtgaacacataca

SEQ ID NO: 6482 - DNA, 20 bp, Artificial Sequence
  Synthetic
gtcttcacagaagtggcagt

SEQ ID NO: 6483 - DNA, 20 bp, Artificial Sequence
  Synthetic
gccaggctgtgacctttccg

SEQ ID NO: 6484 - DNA, 20 bp, Artificial Sequence
  Synthetic
ggaggcgctcaccgtctaag

SEQ ID NO: 6485 - DNA, 20 bp, Artificial Sequence
  Synthetic
gtgccacaacaccactttgt

SEQ ID NO: 6486 - DNA, 20 bp, Artificial Sequence
  Synthetic
ggtctttagcaaggagactg

SEQ ID NO: 6487 - DNA, 20 bp, Artificial Sequence
  Synthetic
gaggacagagaagcgagatg

SEQ ID NO: 6488 - DNA, 20 bp, Artificial Sequence
  Synthetic
gtaactatcatggaggcaaa

SEQ ID NO: 6489 - DNA, 20 bp, Artificial Sequence
  Synthetic
ggtttccaacccatgagctc

SEQ ID NO: 6490 - DNA, 20 bp, Artificial Sequence
  Synthetic
gggaagggttggctctaagg

SEQ ID NO: 6491 - DNA, 20 bp, Artificial Sequence
  Synthetic
gccttgcgcctgctctttca

SEQ ID NO: 6492 - DNA, 20 bp, Artificial Sequence
  Synthetic
gggcactatgaaagccaatg

SEQ ID NO: 6493 - DNA, 20 bp, Artificial Sequence
  Synthetic
gagctcatgggttggaaacc

SEQ ID NO: 6494 - DNA, 20 bp, Artificial Sequence
  Synthetic
gtcgccagtgtggtgtttcc

SEQ ID NO: 6495 - DNA, 20 bp, Artificial Sequence
  Synthetic
gagaaagcggaattcgatgg

SEQ ID NO: 6496 - DNA, 20 bp, Artificial Sequence
  Synthetic
gcgcgcgtctcacacagtgt

SEQ ID NO: 6497 - DNA, 20 bp, Artificial Sequence
  Synthetic
gaacggtgacccatctcgct

SEQ ID NO: 6498 - DNA, 20 bp, Artificial Sequence
  Synthetic
gttaaagtgatgggaggtaa

SEQ ID NO: 6499 - DNA, 20 bp, Artificial Sequence
  Synthetic
gtgtgtgtgtgagagagggc

SEQ ID NO: 6500 - DNA, 20 bp, Artificial Sequence
  Synthetic
gcactcacaaggttgacata

SEQ ID NO: 6501 - DNA, 20 bp, Artificial Sequence
  Synthetic
ggtaacttcttactctggta

SEQ ID NO: 6502 - DNA, 20 bp, Artificial Sequence
  Synthetic
gcgcttgattcacaaggcaa

SEQ ID NO: 6503 - DNA, 20 bp, Artificial Sequence
  Synthetic
gtgactgacagctcggagcc

SEQ ID NO: 6504 - DNA, 20 bp, Artificial Sequence
  Synthetic
gaccacgcagaacgaggcac

SEQ ID NO: 6505 - DNA, 20 bp, Artificial Sequence
  Synthetic
gcgtgtatccaggcagatcg

SEQ ID NO: 6506 - DNA, 20 bp, Artificial Sequence
  Synthetic
gagatctctttgggtataca

SEQ ID NO: 6507 - DNA, 20 bp, Artificial Sequence
  Synthetic
ggaaagggttctgttcttaa

SEQ ID NO: 6508 - DNA, 20 bp, Artificial Sequence
  Synthetic
ggatgtcgtgggatgacgta

SEQ ID NO: 6509 - DNA, 20 bp, Artificial Sequence
  Synthetic
gggaacagggtcccagattc

SEQ ID NO: 6510 - DNA, 20 bp, Artificial Sequence
  Synthetic
ggctggaggtgttgcagcac

SEQ ID NO: 6511 - DNA, 20 bp, Artificial Sequence
  Synthetic
ggctgcctcaggtcttggtt

SEQ ID NO: 6512 - DNA, 20 bp, Artificial Sequence
  Synthetic
gatcgaccgcgggctttact

SEQ ID NO: 6513 - DNA, 20 bp, Artificial Sequence
  Synthetic
gaaacatgaataggcaaagg

SEQ ID NO: 6514 - DNA, 20 bp, Artificial Sequence
  Synthetic
gagaattgacaaagtggctg

SEQ ID NO: 6515 - DNA, 20 bp, Artificial Sequence
  Synthetic
gagtgcgtttacggcgactt

SEQ ID NO: 6516 - DNA, 20 bp, Artificial Sequence
  Synthetic
gcttccagtctgtatgaacc

SEQ ID NO: 6517 - DNA, 20 bp, Artificial Sequence
  Synthetic
gcctcacattgccacattcg

SEQ ID NO: 6518 - DNA, 20 bp, Artificial Sequence
  Synthetic
gtctgtatgaaccaggcctg

SEQ ID NO: 6519 - DNA, 20 bp, Artificial Sequence
  Synthetic
gttaccttaaaccttgggta

SEQ ID NO: 6520 - DNA, 20 bp, Artificial Sequence
  Synthetic
gagctgtgtgtctccgagcc

SEQ ID NO: 6521 - DNA, 20 bp, Artificial Sequence
  Synthetic
gctgtctatgaatgggaagg

SEQ ID NO: 6522 - DNA, 20 bp, Artificial Sequence
  Synthetic
gcagtcctatgcgagcgtgt

SEQ ID NO: 6523 - DNA, 20 bp, Artificial Sequence
  Synthetic
gggatggtctctagacagca

SEQ ID NO: 6524 - DNA, 20 bp, Artificial Sequence
  Synthetic
gtagcagggagtccttgacg

SEQ ID NO: 6525 - DNA, 20 bp, Artificial Sequence
  Synthetic
ggagttagagaggagccgcc

SEQ ID NO: 6526 - DNA, 20 bp, Artificial Sequence
  Synthetic
gctgtgtgggaacagctctg

SEQ ID NO: 6527 - DNA, 20 bp, Artificial Sequence
  Synthetic
ggtgttgcgggaccctagag

SEQ ID NO: 6528 - DNA, 20 bp, Artificial Sequence
  Synthetic
gtcatctgcaggtccaggga

SEQ ID NO: 6529 - DNA, 20 bp, Artificial Sequence
  Synthetic
gtcatctgccaccattagcc

SEQ ID NO: 6530 - DNA, 20 bp, Artificial Sequence
  Synthetic
gtatgctccagttataaagg

SEQ ID NO: 6531 - DNA, 20 bp, Artificial Sequence
  Synthetic
gagttagagaggagccgcca

SEQ ID NO: 6532 - DNA, 20 bp, Artificial Sequence
  Synthetic
gacagctgcgcatgcgcaat

SEQ ID NO: 6533 - DNA, 20 bp, Artificial Sequence
  Synthetic
ggcacgttctttagcttcct

SEQ ID NO: 6534 - DNA, 20 bp, Artificial Sequence
  Synthetic
gccatccgcaagcgattcct

SEQ ID NO: 6535 - DNA, 20 bp, Artificial Sequence
  Synthetic
gtgcaggctgaccaagaacc

SEQ ID NO: 6536 - DNA, 20 bp, Artificial Sequence
  Synthetic
gaacagtgcctagtgaagtt

SEQ ID NO: 6537 - DNA, 20 bp, Artificial Sequence
  Synthetic
ggaggcacttcccttgtctg

SEQ ID NO: 6538 - DNA, 20 bp, Artificial Sequence
  Synthetic
gacaatgatcactctggaga

SEQ ID NO: 6539 - DNA, 20 bp, Artificial Sequence
  Synthetic
gctaatgctactgactgtct

SEQ ID NO: 6540 - DNA, 20 bp, Artificial Sequence
  Synthetic
gatttcccaaacaggcttac

SEQ ID NO: 6541 - DNA, 20 bp, Artificial Sequence
  Synthetic
gaataagtcacccatattga

SEQ ID NO: 6542 - DNA, 20 bp, Artificial Sequence
  Synthetic
gtacctgaaagttctgtatt

SEQ ID NO: 6543 - DNA, 20 bp, Artificial Sequence
  Synthetic
gaggtcttcaggaagctgtt

SEQ ID NO: 6544 - DNA, 20 bp, Artificial Sequence
  Synthetic
gaacattgggatgatgtcat

SEQ ID NO: 6545 - DNA, 20 bp, Artificial Sequence
  Synthetic
gtaattgcctcccattcact

SEQ ID NO: 6546 - DNA, 20 bp, Artificial Sequence
  Synthetic
ggctaaagaggagagaacat

SEQ ID NO: 6547 - DNA, 20 bp, Artificial Sequence
  Synthetic
ggtctctcttcctttgtcta

SEQ ID NO: 6548 - DNA, 20 bp, Artificial Sequence
  Synthetic
ggatgtggcaatgtatctca

SEQ ID NO: 6549 - DNA, 20 bp, Artificial Sequence
  Synthetic
gtctctcttcctttgtctat

SEQ ID NO: 6550 - DNA, 20 bp, Artificial Sequence
  Synthetic
gaagaaggaggaggaggagg

SEQ ID NO: 6551 - DNA, 20 bp, Artificial Sequence
  Synthetic
gaaagtgtgcactttctcaa

SEQ ID NO: 6552 - DNA, 20 bp, Artificial Sequence
  Synthetic
gccctaactacacaggctat

SEQ ID NO: 6553 - DNA, 20 bp, Artificial Sequence
  Synthetic
gctgacactagctgcaagcc

SEQ ID NO: 6554 - DNA, 20 bp, Artificial Sequence
  Synthetic
ggcttgcagctagtgtcagc

SEQ ID NO: 6555 - DNA, 20 bp, Artificial Sequence
  Synthetic
gaaatgtatctcagaatcca

SEQ ID NO: 6556 - DNA, 20 bp, Artificial Sequence
  Synthetic
gcacgaggagttatgcttag

SEQ ID NO: 6557 - DNA, 20 bp, Artificial Sequence
  Synthetic
gattagctgctctagaagcc

SEQ ID NO: 6558 - DNA, 20 bp, Artificial Sequence
  Synthetic
gctttcctttaggacttggt

SEQ ID NO: 6559 - DNA, 20 bp, Artificial Sequence
  Synthetic
gcagaggtgctagggctaca

SEQ ID NO: 6560 - DNA, 20 bp, Artificial Sequence
  Synthetic
ggagactctgatgggcgagt

SEQ ID NO: 6561 - DNA, 20 bp, Artificial Sequence
  Synthetic
ggttgtgcaagctcagtatg

SEQ ID NO: 6562 - DNA, 20 bp, Artificial Sequence
  Synthetic
gcttcttccctgaggcgcac

SEQ ID NO: 6563 - DNA, 20 bp, Artificial Sequence
  Synthetic
gagatggcaatgaacagact

SEQ ID NO: 6564 - DNA, 20 bp, Artificial Sequence
  Synthetic
ggcctgagcagtgactgtga

SEQ ID NO: 6565 - DNA, 20 bp, Artificial Sequence
  Synthetic
gctagaaattcgggagcccg

SEQ ID NO: 6566 - DNA, 20 bp, Artificial Sequence
  Synthetic
gagattcaactggatcctgg

SEQ ID NO: 6567 - DNA, 20 bp, Artificial Sequence
  Synthetic
gaacattccgctttgatgga

SEQ ID NO: 6568 - DNA, 20 bp, Artificial Sequence
  Synthetic
ggtcgatataaagagtagca

SEQ ID NO: 6569 - DNA, 20 bp, Artificial Sequence
  Synthetic
gttcctccatcctctggaga

SEQ ID NO: 6570 - DNA, 20 bp, Artificial Sequence
  Synthetic
gagtagcaaggagatcatta

SEQ ID NO: 6571 - DNA, 20 bp, Artificial Sequence
  Synthetic
ggagggaaggcgcaacctgt

SEQ ID NO: 6572 - DNA, 20 bp, Artificial Sequence
  Synthetic
gaacactgaaagcgtcaagg

SEQ ID NO: 6573 - DNA, 20 bp, Artificial Sequence
  Synthetic
gcgcctatttccagagttga

SEQ ID NO: 6574 - DNA, 20 bp, Artificial Sequence
  Synthetic
gtttctgctgcagaactttc

SEQ ID NO: 6575 - DNA, 20 bp, Artificial Sequence
  Synthetic
gactacccgtctccagagga

SEQ ID NO: 6576 - DNA, 20 bp, Artificial Sequence
  Synthetic
ggagctcgggaaatacaaca

SEQ ID NO: 6577 - DNA, 20 bp, Artificial Sequence
  Synthetic
gactctgagcttcgcgcctc

SEQ ID NO: 6578 - DNA, 20 bp, Artificial Sequence
  Synthetic
ggacactgaaatacgagaag

SEQ ID NO: 6579 - DNA, 20 bp, Artificial Sequence
  Synthetic
gtgtttaacatgtccctgga

SEQ ID NO: 6580 - DNA, 20 bp, Artificial Sequence
  Synthetic
gttgctgctcggagtcgacc

SEQ ID NO: 6581 - DNA, 20 bp, Artificial Sequence
  Synthetic
gagctatgtgatggagacag

SEQ ID NO: 6582 - DNA, 20 bp, Artificial Sequence
  Synthetic
ggcatttccaaagggtggaa

SEQ ID NO: 6583 - DNA, 20 bp, Artificial Sequence
  Synthetic
ggagaggaggacgtgctagg

SEQ ID NO: 6584 - DNA, 20 bp, Artificial Sequence
  Synthetic
gtttctgcctgtgcccggtt

SEQ ID NO: 6585 - DNA, 20 bp, Artificial Sequence
  Synthetic
gttccgcatctgctgtgcgc

SEQ ID NO: 6586 - DNA, 20 bp, Artificial Sequence
  Synthetic
gattgtgagaactgaatctt

SEQ ID NO: 6587 - DNA, 20 bp, Artificial Sequence
  Synthetic
ggatctaaggcaccctgctg

SEQ ID NO: 6588 - DNA, 20 bp, Artificial Sequence
  Synthetic
gtgttggcaaagtcgggagg

SEQ ID NO: 6589 - DNA, 20 bp, Artificial Sequence
  Synthetic
ggacagcaactgtgtgtggg

SEQ ID NO: 6590 - DNA, 20 bp, Artificial Sequence
  Synthetic
gtcagaggtgagaagcggga

SEQ ID NO: 6591 - DNA, 20 bp, Artificial Sequence
  Synthetic
gcgcgcgatgattggctgac

SEQ ID NO: 6592 - DNA, 20 bp, Artificial Sequence
  Synthetic
gcctaccggatctgtgtgga

SEQ ID NO: 6593 - DNA, 20 bp, Artificial Sequence
  Synthetic
gacttcagccggttcttgta

SEQ ID NO: 6594 - DNA, 20 bp, Artificial Sequence
  Synthetic
ggagcatagagtacttacca

SEQ ID NO: 6595 - DNA, 20 bp, Artificial Sequence
  Synthetic
gagactgtagcttcctcaga

SEQ ID NO: 6596 - DNA, 20 bp, Artificial Sequence
  Synthetic
gttggctaatctcagccaag

SEQ ID NO: 6597 - DNA, 20 bp, Artificial Sequence
  Synthetic
gagataaagtctgctccctt

SEQ ID NO: 6598 - DNA, 20 bp, Artificial Sequence
  Synthetic
gacgttattaatacctctcc

SEQ ID NO: 6599 - DNA, 20 bp, Artificial Sequence
  Synthetic
gaatttcaagactacttacc

SEQ ID NO: 6600 - DNA, 20 bp, Artificial Sequence
  Synthetic
gaaagatcccagagaagggt

SEQ ID NO: 6601 - DNA, 20 bp, Artificial Sequence
  Synthetic
gccttgtgtagctcccggtc

SEQ ID NO: 6602 - DNA, 20 bp, Artificial Sequence
  Synthetic
gagtcagaagtctggcgggc

SEQ ID NO: 6603 - DNA, 20 bp, Artificial Sequence
  Synthetic
gaggtggagaagagggaggg

SEQ ID NO: 6604 - DNA, 20 bp, Artificial Sequence
  Synthetic
gaagctgactgacaaccctc

SEQ ID NO: 6605 - DNA, 20 bp, Artificial Sequence
  Synthetic
gtcagagatgacctagtcag

SEQ ID NO: 6606 - DNA, 20 bp, Artificial Sequence
  Synthetic
gaatattggatgcctcagtt

SEQ ID NO: 6607 - DNA, 20 bp, Artificial Sequence
  Synthetic
gccactctcaagccaggacc

SEQ ID NO: 6608 - DNA, 20 bp, Artificial Sequence
  Synthetic
gaacaaatagttgaagctgt

SEQ ID NO: 6609 - DNA, 20 bp, Artificial Sequence
  Synthetic
gaatggaatgctgggagcga

SEQ ID NO: 6610 - DNA, 20 bp, Artificial Sequence
  Synthetic
gaagagcaaattgagaggtg

SEQ ID NO: 6611 - DNA, 20 bp, Artificial Sequence
  Synthetic
gttgggtaagcaggaaagcc

SEQ ID NO: 6612 - DNA, 20 bp, Artificial Sequence
  Synthetic
ggcacagctaatcaaactct

SEQ ID NO: 6613 - DNA, 20 bp, Artificial Sequence
  Synthetic
gatatacttccctgcagctt

SEQ ID NO: 6614 - DNA, 20 bp, Artificial Sequence
  Synthetic
gcagaagagagcaactgcac

SEQ ID NO: 6615 - DNA, 20 bp, Artificial Sequence
  Synthetic
gcagctgggactctaccgag

SEQ ID NO: 6616 - DNA, 20 bp, Artificial Sequence
  Synthetic
gggtcgatcttgtgagtttg

SEQ ID NO: 6617 - DNA, 20 bp, Artificial Sequence
  Synthetic
gaagtccaagcaagactgca

SEQ ID NO: 6618 - DNA, 20 bp, Artificial Sequence
  Synthetic
gcacagagacttgaataatg

SEQ ID NO: 6619 - DNA, 20 bp, Artificial Sequence
  Synthetic
gagcacagatgaaagtggag

SEQ ID NO: 6620 - DNA, 20 bp, Artificial Sequence
  Synthetic
gtttgcatagaggagaccga

SEQ ID NO: 6621 - DNA, 20 bp, Artificial Sequence
  Synthetic
gaatcccaccctgtcctccc

SEQ ID NO: 6622 - DNA, 20 bp, Artificial Sequence
  Synthetic
ggatctctccaaggcagagc

SEQ ID NO: 6623 - DNA, 20 bp, Artificial Sequence
  Synthetic
gcagctacaggcttggatcc

SEQ ID NO: 6624 - DNA, 20 bp, Artificial Sequence
  Synthetic
gtgagccctgcagtcttgct

SEQ ID NO: 6625 - DNA, 20 bp, Artificial Sequence
  Synthetic
gatagtgtcgatagtgggag

SEQ ID NO: 6626 - DNA, 20 bp, Artificial Sequence
  Synthetic
gtaagtggtgcaagcagaaa

SEQ ID NO: 6627 - DNA, 20 bp, Artificial Sequence
  Synthetic
gtacaaggaatcgcagcact

SEQ ID NO: 6628 - DNA, 20 bp, Artificial Sequence
  Synthetic
gagggagactgagtggctca

SEQ ID NO: 6629 - DNA, 20 bp, Artificial Sequence
  Synthetic
gcgctagggagggtcatgac

SEQ ID NO: 6630 - DNA, 20 bp, Artificial Sequence
  Synthetic
gcgaggatacaagttagttt

SEQ ID NO: 6631 - DNA, 20 bp, Artificial Sequence
  Synthetic
gctcagaatttgaggctggt

SEQ ID NO: 6632 - DNA, 20 bp, Artificial Sequence
  Synthetic
ggcggatttcccggcttctg

SEQ ID NO: 6633 - DNA, 20 bp, Artificial Sequence
  Synthetic
ggaagtcgggtgggagatgt

SEQ ID NO: 6634 - DNA, 20 bp, Artificial Sequence
  Synthetic
gcggatttcccggcttctgt

SEQ ID NO: 6635 - DNA, 20 bp, Artificial Sequence
  Synthetic
gcagctcaggaccagaggtt

SEQ ID NO: 6636 - DNA, 20 bp, Artificial Sequence
  Synthetic
gatgtctgcccaggtcgcag

SEQ ID NO: 6637 - DNA, 20 bp, Artificial Sequence
  Synthetic
gaaacagccactgctgggag

SEQ ID NO: 6638 - DNA, 20 bp, Artificial Sequence
  Synthetic
gaaacagcctctggaccaga

SEQ ID NO: 6639 - DNA, 20 bp, Artificial Sequence
  Synthetic
gctataaccctcggaagacg

SEQ ID NO: 6640 - DNA, 20 bp, Artificial Sequence
  Synthetic
gttgaccatcactaggcctt

SEQ ID NO: 6641 - DNA, 20 bp, Artificial Sequence
  Synthetic
ggtgtcagggtagtggtaga

SEQ ID NO: 6642 - DNA, 20 bp, Artificial Sequence
  Synthetic
ggcctggccttgtggttctg

SEQ ID NO: 6643 - DNA, 20 bp, Artificial Sequence
  Synthetic
ggcggcgcctttctgttgaa

SEQ ID NO: 6644 - DNA, 20 bp, Artificial Sequence
  Synthetic
ggtgagaagttagaaagtgg

SEQ ID NO: 6645 - DNA, 20 bp, Artificial Sequence
  Synthetic
gctgaagactgtagtcaggc

SEQ ID NO: 6646 - DNA, 20 bp, Artificial Sequence
  Synthetic
ggtttgaactcagtgcgaga

SEQ ID NO: 6647 - DNA, 20 bp, Artificial Sequence
  Synthetic
gagctaaagcaccatcaaca

SEQ ID NO: 6648 - DNA, 20 bp, Artificial Sequence
  Synthetic
gaggagatcaaggtcctatg

SEQ ID NO: 6649 - DNA, 20 bp, Artificial Sequence
  Synthetic
gggtacccacgttaacacga

SEQ ID NO: 6650 - DNA, 20 bp, Artificial Sequence
  Synthetic
gattagggttcagggattcc

SEQ ID NO: 6651 - DNA, 20 bp, Artificial Sequence
  Synthetic
ggtgtgtcatcctgactcaa

SEQ ID NO: 6652 - DNA, 20 bp, Artificial Sequence
  Synthetic
gccactatgaccctagaaat

SEQ ID NO: 6653 - DNA, 20 bp, Artificial Sequence
  Synthetic
gagttgttagggctgactgc

SEQ ID NO: 6654 - DNA, 20 bp, Artificial Sequence
  Synthetic
gactgcagaagccttggatc

SEQ ID NO: 6655 - DNA, 20 bp, Artificial Sequence
  Synthetic
gggactggtgtgctgggaaa

SEQ ID NO: 6656 - DNA, 20 bp, Artificial Sequence
  Synthetic
gattgtcgccttcctcgtgg

SEQ ID NO: 6657 - DNA, 20 bp, Artificial Sequence
  Synthetic
gccatgttggtaaaggtatc

SEQ ID NO: 6658 - DNA, 20 bp, Artificial Sequence
  Synthetic
gggactggttcttaatcggt

SEQ ID NO: 6659 - DNA, 20 bp, Artificial Sequence
  Synthetic
gcagtggacagtgacgtggc

SEQ ID NO: 6660 - DNA, 20 bp, Artificial Sequence
  Synthetic
gactctcaatctacctattc

SEQ ID NO: 6661 - DNA, 20 bp, Artificial Sequence
  Synthetic
gccgccatctttgtacagac

SEQ ID NO: 6662 - DNA, 20 bp, Artificial Sequence
  Synthetic
gacggtgggagtctaggaaa

SEQ ID NO: 6663 - DNA, 20 bp, Artificial Sequence
  Synthetic
ggccgccatctttgtacaga

SEQ ID NO: 6664 - DNA, 20 bp, Artificial Sequence
  Synthetic
gacacagggactagcaggct

SEQ ID NO: 6665 - DNA, 20 bp, Artificial Sequence
  Synthetic
gagttctctgatatggcctt

SEQ ID NO: 6666 - DNA, 20 bp, Artificial Sequence
  Synthetic
ggcatagtgcagctcgccag

SEQ ID NO: 6667 - DNA, 20 bp, Artificial Sequence
  Synthetic
gtaacaagggccaatgtcac

SEQ ID NO: 6668 - DNA, 20 bp, Artificial Sequence
  Synthetic
gttgctagtttgattaactc

SEQ ID NO: 6669 - DNA, 20 bp, Artificial Sequence
  Synthetic
ggactagagaggccattcca

SEQ ID NO: 6670 - DNA, 20 bp, Artificial Sequence
  Synthetic
gagttggttggctctaacca

SEQ ID NO: 6671 - DNA, 20 bp, Artificial Sequence
  Synthetic
ggcatacggcccaggaatag

SEQ ID NO: 6672 - DNA, 20 bp, Artificial Sequence
  Synthetic
gctcctttagcctaagacac

SEQ ID NO: 6673 - DNA, 20 bp, Artificial Sequence
  Synthetic
gttatttgatctgtgaaagg

SEQ ID NO: 6674 - DNA, 20 bp, Artificial Sequence
  Synthetic
gggtgctcaaactgcacaga

SEQ ID NO: 6675 - DNA, 20 bp, Artificial Sequence
  Synthetic
gggacacagccagagcgctt

SEQ ID NO: 6676 - DNA, 20 bp, Artificial Sequence
  Synthetic
ggaaaccctgtcttcccgcg

SEQ ID NO: 6677 - DNA, 20 bp, Artificial Sequence
  Synthetic
gttccaaggctctgctgtga

SEQ ID NO: 6678 - DNA, 20 bp, Artificial Sequence
  Synthetic
gaattggtctttattgttgg

SEQ ID NO: 6679 - DNA, 20 bp, Artificial Sequence
  Synthetic
ggtggcgatacatcaattac

SEQ ID NO: 6680 - DNA, 20 bp, Artificial Sequence
  Synthetic
gctgattgctggagaagtga

SEQ ID NO: 6681 - DNA, 20 bp, Artificial Sequence
  Synthetic
gacatgggtcctgagttcca

SEQ ID NO: 6682 - DNA, 20 bp, Artificial Sequence
  Synthetic
ggaactggcatggtgtgcca

SEQ ID NO: 6683 - DNA, 20 bp, Artificial Sequence
  Synthetic
gcctctggagggaagaggct

SEQ ID NO: 6684 - DNA, 20 bp, Artificial Sequence
  Synthetic
gcctaacacagcagaaggag

SEQ ID NO: 6685 - DNA, 20 bp, Artificial Sequence
  Synthetic
gggactgagttgtgtgtctt

SEQ ID NO: 6686 - DNA, 20 bp, Artificial Sequence
  Synthetic
gtactcagggtggaggagaa

SEQ ID NO: 6687 - DNA, 20 bp, Artificial Sequence
  Synthetic
gttaggcaaagtccaaggta

SEQ ID NO: 6688 - DNA, 20 bp, Artificial Sequence
  Synthetic
gtctatttcttctctggagg

SEQ ID NO: 6689 - DNA, 20 bp, Artificial Sequence
  Synthetic
ggccttcctagttaacttca

SEQ ID NO: 6690 - DNA, 20 bp, Artificial Sequence
  Synthetic
gcactttgccttgcttcagc

SEQ ID NO: 6691 - DNA, 20 bp, Artificial Sequence
  Synthetic
ggaagaatttcacaaagtac

SEQ ID NO: 6692 - DNA, 20 bp, Artificial Sequence
  Synthetic
gggaaacagcgtgaggaggc

SEQ ID NO: 6693 - DNA, 20 bp, Artificial Sequence
  Synthetic
gaagacagtgtacttgagtt

SEQ ID NO: 6694 - DNA, 20 bp, Artificial Sequence
  Synthetic
gcaaactgaaggagagacgg

SEQ ID NO: 6695 - DNA, 20 bp, Artificial Sequence
  Synthetic
gcagcgctatgcaataaatt

SEQ ID NO: 6696 - DNA, 20 bp, Artificial Sequence
  Synthetic
gccaaacccaggcaaactga

SEQ ID NO: 6697 - DNA, 20 bp, Artificial Sequence
  Synthetic
gtctctccttcagtttgcct

SEQ ID NO: 6698 - DNA, 20 bp, Artificial Sequence
  Synthetic
gagactgtggtacacctctg

SEQ ID NO: 6699 - DNA, 20 bp, Artificial Sequence
  Synthetic
gtagggcatttccagataag

SEQ ID NO: 6700 - DNA, 20 bp, Artificial Sequence
  Synthetic
ggagtttacttacacagcag

SEQ ID NO: 6701 - DNA, 20 bp, Artificial Sequence
  Synthetic
ggttcagctattcctcctgc

SEQ ID NO: 6702 - DNA, 20 bp, Artificial Sequence
  Synthetic
gaccaagtacagattcttag

SEQ ID NO: 6703 - DNA, 20 bp, Artificial Sequence
  Synthetic
ggcgaactatttatgtggaa

SEQ ID NO: 6704 - DNA, 20 bp, Artificial Sequence
  Synthetic
gcatttctgcaacctggaac

SEQ ID NO: 6705 - DNA, 20 bp, Artificial Sequence
  Synthetic
ggaagcaggactaggctctt

SEQ ID NO: 6706 - DNA, 20 bp, Artificial Sequence
  Synthetic
gaaattctgcagtctccagt

SEQ ID NO: 6707 - DNA, 20 bp, Artificial Sequence
  Synthetic
gggatgtacacagaggatac

SEQ ID NO: 6708 - DNA, 20 bp, Artificial Sequence
  Synthetic
gcaagctgtccctgggtacg

SEQ ID NO: 6709 - DNA, 20 bp, Artificial Sequence
  Synthetic
gcctctgggagttaaatggc

SEQ ID NO: 6710 - DNA, 20 bp, Artificial Sequence
  Synthetic
ggtaaaggtgggtgggaggg

SEQ ID NO: 6711 - DNA, 20 bp, Artificial Sequence
  Synthetic
gcagggtgcagggagttgtt

SEQ ID NO: 6712 - DNA, 20 bp, Artificial Sequence
  Synthetic
gcattgcaatcagagtcagt

SEQ ID NO: 6713 - DNA, 20 bp, Artificial Sequence
  Synthetic
gcagcggcttggagcaagaa

SEQ ID NO: 6714 - DNA, 20 bp, Artificial Sequence
  Synthetic
gggtctcctgatctcttacc

SEQ ID NO: 6715 - DNA, 20 bp, Artificial Sequence
  Synthetic
gaactggatagacttctcgg

SEQ ID NO: 6716 - DNA, 20 bp, Artificial Sequence
  Synthetic
gatggcgaggaagggaatgg

SEQ ID NO: 6717 - DNA, 20 bp, Artificial Sequence
  Synthetic
gggaaatgtttctagaagga

SEQ ID NO: 6718 - DNA, 20 bp, Artificial Sequence
  Synthetic
gatgctaaataattaagggc

SEQ ID NO: 6719 - DNA, 20 bp, Artificial Sequence
  Synthetic
gatccaggctggagtccacc

SEQ ID NO: 6720 - DNA, 20 bp, Artificial Sequence
  Synthetic
gggatggcgaggaagggaat

SEQ ID NO: 6721 - DNA, 20 bp, Artificial Sequence
  Synthetic
gaggttccagccactagcct

SEQ ID NO: 6722 - DNA, 20 bp, Artificial Sequence
  Synthetic
gccaagccaagccctgttcc

SEQ ID NO: 6723 - DNA, 20 bp, Artificial Sequence
  Synthetic
gaaggatgctaaaggctgga

SEQ ID NO: 6724 - DNA, 20 bp, Artificial Sequence
  Synthetic
gtaaatctcttcctagttca

SEQ ID NO: 6725 - DNA, 20 bp, Artificial Sequence
  Synthetic
gaggcagctccatgtttgcg

SEQ ID NO: 6726 - DNA, 20 bp, Artificial Sequence
  Synthetic
gttactagatgaaagagggt

SEQ ID NO: 6727 - DNA, 20 bp, Artificial Sequence
  Synthetic
gctccgcgcccttagttagg

SEQ ID NO: 6728 - DNA, 20 bp, Artificial Sequence
  Synthetic
gtagatgaggtttacatttg

SEQ ID NO: 6729 - DNA, 20 bp, Artificial Sequence
  Synthetic
gtgattggctaaaccattga

SEQ ID NO: 6730 - DNA, 20 bp, Artificial Sequence
  Synthetic
gactgaacctcagcgttcca

SEQ ID NO: 6731 - DNA, 20 bp, Artificial Sequence
  Synthetic
gtgcaagaattcagtccaca

SEQ ID NO: 6732 - DNA, 20 bp, Artificial Sequence
  Synthetic
gtggtcaaggtagacaccta

SEQ ID NO: 6733 - DNA, 20 bp, Artificial Sequence
  Synthetic
ggagactcgtggcgtcaaat

SEQ ID NO: 6734 - DNA, 20 bp, Artificial Sequence
  Synthetic
gtcactctgagaggagttaa

SEQ ID NO: 6735 - DNA, 20 bp, Artificial Sequence
  Synthetic
gctttctgggacaaggactt

SEQ ID NO: 6736 - DNA, 20 bp, Artificial Sequence
  Synthetic
ggaaggagagtataccaggt

SEQ ID NO: 6737 - DNA, 20 bp, Artificial Sequence
  Synthetic
gcttgctctaagcaagcagg

SEQ ID NO: 6738 - DNA, 20 bp, Artificial Sequence
  Synthetic
gacagaatcctagagcaagg

SEQ ID NO: 6739 - DNA, 20 bp, Artificial Sequence
  Synthetic
ggtttgcacacatttgtgaa

SEQ ID NO: 6740 - DNA, 20 bp, Artificial Sequence
  Synthetic
gaagctaccgagtgctgcct

SEQ ID NO: 6741 - DNA, 20 bp, Artificial Sequence
  Synthetic
ggagaggtgggaagtgaggt

SEQ ID NO: 6742 - DNA, 20 bp, Artificial Sequence
  Synthetic
gcaagtaggtcccagataca

SEQ ID NO: 6743 - DNA, 20 bp, Artificial Sequence
  Synthetic
gtgctgcctaggataagaag

SEQ ID NO: 6744 - DNA, 20 bp, Artificial Sequence
  Synthetic
gtgacacgtgggaagaggag

SEQ ID NO: 6745 - DNA, 20 bp, Artificial Sequence
  Synthetic
ggctacttacaatctctcca

SEQ ID NO: 6746 - DNA, 20 bp, Artificial Sequence
  Synthetic
gtataactcacagataagga

SEQ ID NO: 6747 - DNA, 20 bp, Artificial Sequence
  Synthetic
gtggagataagggaaggtgg

SEQ ID NO: 6748 - DNA, 20 bp, Artificial Sequence
  Synthetic
gtctctatgctacagtgcca

SEQ ID NO: 6749 - DNA, 20 bp, Artificial Sequence
  Synthetic
ggcagtctgcgggtctatgc

SEQ ID NO: 6750 - DNA, 20 bp, Artificial Sequence
  Synthetic
gtctgtgcctccttggatct

SEQ ID NO: 6751 - DNA, 20 bp, Artificial Sequence
  Synthetic
gaggccctaggcaggattgg

SEQ ID NO: 6752 - DNA, 20 bp, Artificial Sequence
  Synthetic
gtcctgccaatgctgacagt

SEQ ID NO: 6753 - DNA, 20 bp, Artificial Sequence
  Synthetic
gggtaattgtcgcacttccc

SEQ ID NO: 6754 - DNA, 20 bp, Artificial Sequence
  Synthetic
gtggacttcctctgtgggta

SEQ ID NO: 6755 - DNA, 20 bp, Artificial Sequence
  Synthetic
ggtgcaaattctgggaagga

SEQ ID NO: 6756 - DNA, 20 bp, Artificial Sequence
  Synthetic
gagcagctgcttaagaggcc

SEQ ID NO: 6757 - DNA, 20 bp, Artificial Sequence
  Synthetic
ggccttagaaagtgggtagg

SEQ ID NO: 6758 - DNA, 20 bp, Artificial Sequence
  Synthetic
gagcataggctgtctgggta

SEQ ID NO: 6759 - DNA, 20 bp, Artificial Sequence
  Synthetic
gtttcaatacgcgttgtaca

SEQ ID NO: 6760 - DNA, 20 bp, Artificial Sequence
  Synthetic
gggtttaaggaggagccgag

SEQ ID NO: 6761 - DNA, 20 bp, Artificial Sequence
  Synthetic
ggccagaaacctagggactc

SEQ ID NO: 6762 - DNA, 20 bp, Artificial Sequence
  Synthetic
gatgacttgcgactaacttc

SEQ ID NO: 6763 - DNA, 20 bp, Artificial Sequence
  Synthetic
gggcctaaactcgctgacca

SEQ ID NO: 6764 - DNA, 20 bp, Artificial Sequence
  Synthetic
ggctaagattaacaagcagg

SEQ ID NO: 6765 - DNA, 20 bp, Artificial Sequence
  Synthetic
gagcacaatttcccaggcaa

SEQ ID NO: 6766 - DNA, 20 bp, Artificial Sequence
  Synthetic
gggaggcagcatagggcttc

SEQ ID NO: 6767 - DNA, 20 bp, Artificial Sequence
  Synthetic
gtcaccgtagcaagctgctg

SEQ ID NO: 6768 - DNA, 20 bp, Artificial Sequence
  Synthetic
gagattctcaatctccaatg

SEQ ID NO: 6769 - DNA, 20 bp, Artificial Sequence
  Synthetic
ggtgtggtgggaagagcaag

SEQ ID NO: 6770 - DNA, 20 bp, Artificial Sequence
  Synthetic
gcaaccggaggagtcacgtt

SEQ ID NO: 6771 - DNA, 20 bp, Artificial Sequence
  Synthetic
ggtcttagctcagagaggga

SEQ ID NO: 6772 - DNA, 20 bp, Artificial Sequence
  Synthetic
gttcctagtagattcaaaca

SEQ ID NO: 6773 - DNA, 20 bp, Artificial Sequence
  Synthetic
gggttgaggctgaagggagg

SEQ ID NO: 6774 - DNA, 20 bp, Artificial Sequence
  Synthetic
gtagcccaccgagatgacaa

SEQ ID NO: 6775 - DNA, 20 bp, Artificial Sequence
  Synthetic
gaaaggcccagtgattccca

SEQ ID NO: 6776 - DNA, 20 bp, Artificial Sequence
  Synthetic
gatcttgaagagtggaagag

SEQ ID NO: 6777 - DNA, 20 bp, Artificial Sequence
  Synthetic
gagctaaattataatggact

SEQ ID NO: 6778 - DNA, 20 bp, Artificial Sequence
  Synthetic
gcccatctatgggtataggc

SEQ ID NO: 6779 - DNA, 20 bp, Artificial Sequence
  Synthetic
gacccaggctcacagaagtg

SEQ ID NO: 6780 - DNA, 20 bp, Artificial Sequence
  Synthetic
ggtccgaaaccgagacctgg

SEQ ID NO: 6781 - DNA, 20 bp, Artificial Sequence
  Synthetic
gtttagggtccattctcctt

SEQ ID NO: 6782 - DNA, 20 bp, Artificial Sequence
  Synthetic
gggtaggcggtggatctagc

SEQ ID NO: 6783 - DNA, 20 bp, Artificial Sequence
  Synthetic
ggtgagaacctcttcttcca

SEQ ID NO: 6784 - DNA, 20 bp, Artificial Sequence
  Synthetic
ggcgcatgttcggcagctac

SEQ ID NO: 6785 - DNA, 20 bp, Artificial Sequence
  Synthetic
ggatctgcaggagagaaggt

SEQ ID NO: 6786 - DNA, 20 bp, Artificial Sequence
  Synthetic
gtgggtagcatatctaagat

SEQ ID NO: 6787 - DNA, 20 bp, Artificial Sequence
  Synthetic
gacagacccgagtgcagagc

SEQ ID NO: 6788 - DNA, 20 bp, Artificial Sequence
  Synthetic
gttcatccctgaattggact

SEQ ID NO: 6789 - DNA, 20 bp, Artificial Sequence
  Synthetic
gggaggtgctgaaacgaccg

SEQ ID NO: 6790 - DNA, 20 bp, Artificial Sequence
  Synthetic
gaaatgataggaatggttgc

SEQ ID NO: 6791 - DNA, 20 bp, Artificial Sequence
  Synthetic
gttggtagaaaggaaacact

SEQ ID NO: 6792 - DNA, 20 bp, Artificial Sequence
  Synthetic
gacttgcttacaaaggttaa

SEQ ID NO: 6793 - DNA, 20 bp, Artificial Sequence
  Synthetic
ggcagagcttggcagagtga

SEQ ID NO: 6794 - DNA, 20 bp, Artificial Sequence
  Synthetic
gcagcatcctacctctctgg

SEQ ID NO: 6795 - DNA, 20 bp, Artificial Sequence
  Synthetic
gattctccctctccctcaag

SEQ ID NO: 6796 - DNA, 20 bp, Artificial Sequence
  Synthetic
gggcttattagttggtagaa

SEQ ID NO: 6797 - DNA, 20 bp, Artificial Sequence
  Synthetic
gagtgagggccctagaggaa

SEQ ID NO: 6798 - DNA, 20 bp, Artificial Sequence
  Synthetic
gtgtatggccataccctccc

SEQ ID NO: 6799 - DNA, 20 bp, Artificial Sequence
  Synthetic
gaggtggccaggatggcact

SEQ ID NO: 6800 - DNA, 20 bp, Artificial Sequence
  Synthetic
gaggatccctaagcggcagc

SEQ ID NO: 6801 - DNA, 20 bp, Artificial Sequence
  Synthetic
gcctggcttaaagccactca

SEQ ID NO: 6802 - DNA, 20 bp, Artificial Sequence
  Synthetic
gtctctgggaagggctgtcc

SEQ ID NO: 6803 - DNA, 20 bp, Artificial Sequence
  Synthetic
gtttcttgtttaagtcctga

SEQ ID NO: 6804 - DNA, 20 bp, Artificial Sequence
  Synthetic
gccctgagtggctttaagcc

SEQ ID NO: 6805 - DNA, 20 bp, Artificial Sequence
  Synthetic
gaaggcgcgggccggtaatt

SEQ ID NO: 6806 - DNA, 20 bp, Artificial Sequence
  Synthetic
gctcatagtagacaaagcca

SEQ ID NO: 6807 - DNA, 20 bp, Artificial Sequence
  Synthetic
gctcatgctacatgaagggc

SEQ ID NO: 6808 - DNA, 20 bp, Artificial Sequence
  Synthetic
ggtgggtaatagatgattct

SEQ ID NO: 6809 - DNA, 20 bp, Artificial Sequence
  Synthetic
gtgcggttggtattagggct

SEQ ID NO: 6810 - DNA, 20 bp, Artificial Sequence
  Synthetic
gtctccaggaacattgaaat

SEQ ID NO: 6811 - DNA, 20 bp, Artificial Sequence
  Synthetic
gtttctccagcccgagccgt

SEQ ID NO: 6812 - DNA, 20 bp, Artificial Sequence
  Synthetic
gagctcaaagtctgacactt

SEQ ID NO: 6813 - DNA, 20 bp, Artificial Sequence
  Synthetic
ggaagtaggctggaaacagt

SEQ ID NO: 6814 - DNA, 20 bp, Artificial Sequence
  Synthetic
gatgaagaagcttggagggt

SEQ ID NO: 6815 - DNA, 20 bp, Artificial Sequence
  Synthetic
ggtgacccggtacctttagt

SEQ ID NO: 6816 - DNA, 20 bp, Artificial Sequence
  Synthetic
ggatgaagaagcttggaggg

SEQ ID NO: 6817 - DNA, 20 bp, Artificial Sequence
  Synthetic
gtagtgctagtgaggcttgc

SEQ ID NO: 6818 - DNA, 20 bp, Artificial Sequence
  Synthetic
gggagagaattaacatttca

SEQ ID NO: 6819 - DNA, 20 bp, Artificial Sequence
  Synthetic
ggagggcagaggacagaaag

SEQ ID NO: 6820 - DNA, 20 bp, Artificial Sequence
  Synthetic
gctgaggtctactgagcctc

SEQ ID NO: 6821 - DNA, 20 bp, Artificial Sequence
  Synthetic
ggccatacccaaagaaacct

SEQ ID NO: 6822 - DNA, 20 bp, Artificial Sequence
  Synthetic
gtctctagcagcaagtggaa

SEQ ID NO: 6823 - DNA, 20 bp, Artificial Sequence
  Synthetic
gcttggttcactgggcccaa

SEQ ID NO: 6824 - DNA, 20 bp, Artificial Sequence
  Synthetic
gtggccagagctgctttagg

SEQ ID NO: 6825 - DNA, 20 bp, Artificial Sequence
  Synthetic
gcaagcagggctgggatcat

SEQ ID NO: 6826 - DNA, 20 bp, Artificial Sequence
  Synthetic
ggagtgcagccagcccttga

SEQ ID NO: 6827 - DNA, 20 bp, Artificial Sequence
  Synthetic
gggatgaaggtttgcttagg

SEQ ID NO: 6828 - DNA, 20 bp, Artificial Sequence
  Synthetic
ggaccacagggcatgaacac

SEQ ID NO: 6829 - DNA, 20 bp, Artificial Sequence
  Synthetic
gacagctcgggatgagcgat

SEQ ID NO: 6830 - DNA, 20 bp, Artificial Sequence
  Synthetic
gctaaataggttgtgcaggc

SEQ ID NO: 6831 - DNA, 20 bp, Artificial Sequence
  Synthetic
ggacacagctggaccgagtg

SEQ ID NO: 6832 - DNA, 20 bp, Artificial Sequence
  Synthetic
gaccacatccgggtaatttc

SEQ ID NO: 6833 - DNA, 20 bp, Artificial Sequence
  Synthetic
ggccaaaccctgaaattacc

SEQ ID NO: 6834 - DNA, 20 bp, Artificial Sequence
  Synthetic
gtcagctagaggtcctccca

SEQ ID NO: 6835 - DNA, 20 bp, Artificial Sequence
  Synthetic
gggaatgagtcttctttcct

SEQ ID NO: 6836 - DNA, 20 bp, Artificial Sequence
  Synthetic
gagaaaggagcgctgcggga

SEQ ID NO: 6837 - DNA, 20 bp, Artificial Sequence
  Synthetic
gcgagcctggaagtggcact

SEQ ID NO: 6838 - DNA, 20 bp, Artificial Sequence
  Synthetic
gcaagacttctttatgcctc

SEQ ID NO: 6839 - DNA, 20 bp, Artificial Sequence
  Synthetic
ggaattacactccggccagc

SEQ ID NO: 6840 - DNA, 20 bp, Artificial Sequence
  Synthetic
gtccaagctgaccgtttgga

SEQ ID NO: 6841 - DNA, 20 bp, Artificial Sequence
  Synthetic
gagattaaataaatgccgtg

SEQ ID NO: 6842 - DNA, 20 bp, Artificial Sequence
  Synthetic
ggaaatgtaatcaagtacaa

SEQ ID NO: 6843 - DNA, 20 bp, Artificial Sequence
  Synthetic
ggcataaagaagtcttgctt

SEQ ID NO: 6844 - DNA, 20 bp, Artificial Sequence
  Synthetic
gtttcctggctgacaactgc

SEQ ID NO: 6845 - DNA, 20 bp, Artificial Sequence
  Synthetic
gggagttgtaaatccatgcc

SEQ ID NO: 6846 - DNA, 20 bp, Artificial Sequence
  Synthetic
ggtgctcgagctgtcttaca

SEQ ID NO: 6847 - DNA, 20 bp, Artificial Sequence
  Synthetic
ggcataaggtaaatcctcga

SEQ ID NO: 6848 - DNA, 20 bp, Artificial Sequence
  Synthetic
gcatccaattcaggttgtca

SEQ ID NO: 6849 - DNA, 20 bp, Artificial Sequence
  Synthetic
gtgaatatgagtagctgtcc

SEQ ID NO: 6850 - DNA, 20 bp, Artificial Sequence
  Synthetic
gaagcctgctaccttaagct

SEQ ID NO: 6851 - DNA, 20 bp, Artificial Sequence
  Synthetic
ggccttggcactctatataa

SEQ ID NO: 6852 - DNA, 20 bp, Artificial Sequence
  Synthetic
gtgggttcacccagcagagc

SEQ ID NO: 6853 - DNA, 20 bp, Artificial Sequence
  Synthetic
gaatttctttcattgagctc

SEQ ID NO: 6854 - DNA, 20 bp, Artificial Sequence
  Synthetic
gtggtgtgcaagtccaggaa

SEQ ID NO: 6855 - DNA, 20 bp, Artificial Sequence
  Synthetic
gtgtttgttagcgcgtgtgc

SEQ ID NO: 6856 - DNA, 20 bp, Artificial Sequence
  Synthetic
gtctaaatcgggccactaac

SEQ ID NO: 6857 - DNA, 20 bp, Artificial Sequence
  Synthetic
gagggcacaggctagtgtgg

SEQ ID NO: 6858 - DNA, 20 bp, Artificial Sequence
  Synthetic
gacagcagtcaagaagacca

SEQ ID NO: 6859 - DNA, 20 bp, Artificial Sequence
  Synthetic
gcagcatcctggagggagga

SEQ ID NO: 6860 - DNA, 20 bp, Artificial Sequence
  Synthetic
gacatttacaccggccagga

SEQ ID NO: 6861 - DNA, 20 bp, Artificial Sequence
  Synthetic
gctggtgctttatggttccc

SEQ ID NO: 6862 - DNA, 20 bp, Artificial Sequence
  Synthetic
ggcgacagcagcaacagcag

SEQ ID NO: 6863 - DNA, 20 bp, Artificial Sequence
  Synthetic
gtgtgtcttgtgcacagctc

SEQ ID NO: 6864 - DNA, 20 bp, Artificial Sequence
  Synthetic
gacacacatttagagggctg

SEQ ID NO: 6865 - DNA, 20 bp, Artificial Sequence
  Synthetic
gcagtcaagaagaccaagga

SEQ ID NO: 6866 - DNA, 20 bp, Artificial Sequence
  Synthetic
gctactgcctcttaaacgct

SEQ ID NO: 6867 - DNA, 20 bp, Artificial Sequence
  Synthetic
gaactgagctgtgtgtgttg

SEQ ID NO: 6868 - DNA, 20 bp, Artificial Sequence
  Synthetic
gaggcatgaatctacagatt

SEQ ID NO: 6869 - DNA, 20 bp, Artificial Sequence
  Synthetic
gctaattactgggcctcagc

SEQ ID NO: 6870 - DNA, 20 bp, Artificial Sequence
  Synthetic
gttctgcaggaaatgtggcc

SEQ ID NO: 6871 - DNA, 20 bp, Artificial Sequence
  Synthetic
gcacgcgtactagtcctttg

SEQ ID NO: 6872 - DNA, 20 bp, Artificial Sequence
  Synthetic
gagttgcccactcaatagac

SEQ ID NO: 6873 - DNA, 20 bp, Artificial Sequence
  Synthetic
gttctatgctccaaggctaa

SEQ ID NO: 6874 - DNA, 20 bp, Artificial Sequence
  Synthetic
gaaattaaagtcctcaggct

SEQ ID NO: 6875 - DNA, 20 bp, Artificial Sequence
  Synthetic
ggtccagatgggagatagta

SEQ ID NO: 6876 - DNA, 20 bp, Artificial Sequence
  Synthetic
gtgttggaacgttcacaggg

SEQ ID NO: 6877 - DNA, 20 bp, Artificial Sequence
  Synthetic
gaggcagagctagaaagctt

SEQ ID NO: 6878 - DNA, 20 bp, Artificial Sequence
  Synthetic
ggcagaggtagcaaggacca

SEQ ID NO: 6879 - DNA, 20 bp, Artificial Sequence
  Synthetic
gctgtatggtcttctattgt

SEQ ID NO: 6880 - DNA, 20 bp, Artificial Sequence
  Synthetic
gctggcatgccgcttaggaa

SEQ ID NO: 6881 - DNA, 20 bp, Artificial Sequence
  Synthetic
gggaggtgtgatttgatgaa

SEQ ID NO: 6882 - DNA, 20 bp, Artificial Sequence
  Synthetic
gaacaggctttcctaccacg

SEQ ID NO: 6883 - DNA, 20 bp, Artificial Sequence
  Synthetic
gcaggtgtgaggttgtgaac

SEQ ID NO: 6884 - DNA, 20 bp, Artificial Sequence
  Synthetic
gctgctgacctttgggcgct

SEQ ID NO: 6885 - DNA, 20 bp, Artificial Sequence
  Synthetic
gatgcagtctgtttatgcct

SEQ ID NO: 6886 - DNA, 20 bp, Artificial Sequence
  Synthetic
ggaactggccagcgatccct

SEQ ID NO: 6887 - DNA, 20 bp, Artificial Sequence
  Synthetic
gcctgagtggttagcaacga

SEQ ID NO: 6888 - DNA, 20 bp, Artificial Sequence
  Synthetic
gtctggtgggacagtctctg

SEQ ID NO: 6889 - DNA, 20 bp, Artificial Sequence
  Synthetic
gggatctccaatttccttca

SEQ ID NO: 6890 - DNA, 20 bp, Artificial Sequence
  Synthetic
ggaactgccagtttcatgaa

SEQ ID NO: 6891 - DNA, 20 bp, Artificial Sequence
  Synthetic
gatgacatcctgaaagcatt

SEQ ID NO: 6892 - DNA, 20 bp, Artificial Sequence
  Synthetic
ggcagcgtaggagacagtgg

SEQ ID NO: 6893 - DNA, 20 bp, Artificial Sequence
  Synthetic
gaactctgctctttcatcca

SEQ ID NO: 6894 - DNA, 20 bp, Artificial Sequence
  Synthetic
gctcagaatgagggtggagg

SEQ ID NO: 6895 - DNA, 20 bp, Artificial Sequence
  Synthetic
gaaacccagcagaggtactt

SEQ ID NO: 6896 - DNA, 20 bp, Artificial Sequence
  Synthetic
gcagaataacagcggtgcgg

SEQ ID NO: 6897 - DNA, 20 bp, Artificial Sequence
  Synthetic
ggcacagagttggctggctg

SEQ ID NO: 6898 - DNA, 20 bp, Artificial Sequence
  Synthetic
gaggaagaaagaatcgctgt

SEQ ID NO: 6899 - DNA, 20 bp, Artificial Sequence
  Synthetic
gctgacttgccctaacacag

SEQ ID NO: 6900 - DNA, 20 bp, Artificial Sequence
  Synthetic
gaactcgggtttgcgagggt

SEQ ID NO: 6901 - DNA, 20 bp, Artificial Sequence
  Synthetic
gctccgaatgattaacgatt

SEQ ID NO: 6902 - DNA, 20 bp, Artificial Sequence
  Synthetic
gaatctgtaaaggcctttgc

SEQ ID NO: 6903 - DNA, 20 bp, Artificial Sequence
  Synthetic
gaagaacttgtagactctaa

SEQ ID NO: 6904 - DNA, 20 bp, Artificial Sequence
  Synthetic
gtgcttcgggaggttgctgg

SEQ ID NO: 6905 - DNA, 20 bp, Artificial Sequence
  Synthetic
gttgagtggctaggcggaac

SEQ ID NO: 6906 - DNA, 20 bp, Artificial Sequence
  Synthetic
gggtgtgagtgtgtgtgtgg

SEQ ID NO: 6907 - DNA, 20 bp, Artificial Sequence
  Synthetic
gtccttacccggtcctaatg

SEQ ID NO: 6908 - DNA, 20 bp, Artificial Sequence
  Synthetic
ggcatagaggagtgctgtgg

SEQ ID NO: 6909 - DNA, 20 bp, Artificial Sequence
  Synthetic
gacacactggcccaattgtc

SEQ ID NO: 6910 - DNA, 20 bp, Artificial Sequence
  Synthetic
gccaaacccaagctgagtcc

SEQ ID NO: 6911 - DNA, 20 bp, Artificial Sequence
  Synthetic
gtgtctctcacttccatgaa

SEQ ID NO: 6912 - DNA, 20 bp, Artificial Sequence
  Synthetic
gagatagtcacatagggcaa

SEQ ID NO: 6913 - DNA, 20 bp, Artificial Sequence
  Synthetic
gagacacaggaggctgaggc

SEQ ID NO: 6914 - DNA, 20 bp, Artificial Sequence
  Synthetic
gttgtatgtgtacagggcaa

SEQ ID NO: 6915 - DNA, 20 bp, Artificial Sequence
  Synthetic
ggcctatggagtagaaagtg

SEQ ID NO: 6916 - DNA, 20 bp, Artificial Sequence
  Synthetic
gaaagaggatcccaaataag

SEQ ID NO: 6917 - DNA, 20 bp, Artificial Sequence
  Synthetic
gcggttcggaaaggagttca

SEQ ID NO: 6918 - DNA, 20 bp, Artificial Sequence
  Synthetic
gaccgttactccagccgaac

SEQ ID NO: 6919 - DNA, 20 bp, Artificial Sequence
  Synthetic
ggtttcaggaccgagctgca

SEQ ID NO: 6920 - DNA, 20 bp, Artificial Sequence
  Synthetic
gtgcagtacaccaacctgaa

SEQ ID NO: 6921 - DNA, 20 bp, Artificial Sequence
  Synthetic
ggaaaggagttcacggattc

SEQ ID NO: 6922 - DNA, 20 bp, Artificial Sequence
  Synthetic
gtcgaagcgccaccttctgc

SEQ ID NO: 6923 - DNA, 20 bp, Artificial Sequence
  Synthetic
gcgaccgggctctagaaaga

SEQ ID NO: 6924 - DNA, 20 bp, Artificial Sequence
  Synthetic
ggatgctagagcctgggtgt

SEQ ID NO: 6925 - DNA, 20 bp, Artificial Sequence
  Synthetic
gaggtcaccttcatggcgcc

SEQ ID NO: 6926 - DNA, 20 bp, Artificial Sequence
  Synthetic
gagtgatctggaaggcaggc

SEQ ID NO: 6927 - DNA, 20 bp, Artificial Sequence
  Synthetic
gctgcacctggagttgagtg

SEQ ID NO: 6928 - DNA, 20 bp, Artificial Sequence
  Synthetic
gtctcttactgggacactga

SEQ ID NO: 6929 - DNA, 20 bp, Artificial Sequence
  Synthetic
gatccgggctggagtgaagt

SEQ ID NO: 6930 - DNA, 20 bp, Artificial Sequence
  Synthetic
gagccagttgtagcaccgcc

SEQ ID NO: 6931 - DNA, 20 bp, Artificial Sequence
  Synthetic
gctgttagcatggatttcca

SEQ ID NO: 6932 - DNA, 20 bp, Artificial Sequence
  Synthetic
gctggaccctgtgtgtagta

SEQ ID NO: 6933 - DNA, 20 bp, Artificial Sequence
  Synthetic
gaccgccagactagctagaa

SEQ ID NO: 6934 - DNA, 20 bp, Artificial Sequence
  Synthetic
gtcctaaagcaggcttgtgt

SEQ ID NO: 6935 - DNA, 20 bp, Artificial Sequence
  Synthetic
gacacacgattgccacgtat

SEQ ID NO: 6936 - DNA, 20 bp, Artificial Sequence
  Synthetic
gtgatccctggcatctgctt

SEQ ID NO: 6937 - DNA, 20 bp, Artificial Sequence
  Synthetic
gccaggtccttgtgtgctac

SEQ ID NO: 6938 - DNA, 20 bp, Artificial Sequence
  Synthetic
ggtgcacagacatgctgtct

SEQ ID NO: 6939 - DNA, 20 bp, Artificial Sequence
  Synthetic
gggctgggaggtgctttgtt

SEQ ID NO: 6940 - DNA, 20 bp, Artificial Sequence
  Synthetic
gacacagtggcagccctttc

SEQ ID NO: 6941 - DNA, 20 bp, Artificial Sequence
  Synthetic
gtacacttcagttcccaggc

SEQ ID NO: 6942 - DNA, 20 bp, Artificial Sequence
  Synthetic
gctcgtacacttcagttccc

SEQ ID NO: 6943 - DNA, 20 bp, Artificial Sequence
  Synthetic
gggtccagggaatgaggtct

SEQ ID NO: 6944 - DNA, 20 bp, Artificial Sequence
  Synthetic
ggagtgtgttccagacttat

SEQ ID NO: 6945 - DNA, 20 bp, Artificial Sequence
  Synthetic
ggccgatgcgaaatgccctt

SEQ ID NO: 6946 - DNA, 20 bp, Artificial Sequence
  Synthetic
ggacgtaacacaactcgtgc

SEQ ID NO: 6947 - DNA, 20 bp, Artificial Sequence
  Synthetic
ggtgcacagtctgcatttga

SEQ ID NO: 6948 - DNA, 20 bp, Artificial Sequence
  Synthetic
gtgaagagtcctagtggcaa

SEQ ID NO: 6949 - DNA, 20 bp, Artificial Sequence
  Synthetic
gcgaagttcaaaggcgaggt

SEQ ID NO: 6950 - DNA, 20 bp, Artificial Sequence
  Synthetic
ggcgcctccacctgtaatcc

SEQ ID NO: 6951 - DNA, 20 bp, Artificial Sequence
  Synthetic
gagctctgggcttgctggct

SEQ ID NO: 6952 - DNA, 20 bp, Artificial Sequence
  Synthetic
gcttcatgcgggcttcgcag

SEQ ID NO: 6953 - DNA, 20 bp, Artificial Sequence
  Synthetic
gtagggtggacaagagggag

SEQ ID NO: 6954 - DNA, 20 bp, Artificial Sequence
  Synthetic
ggcaggttgtatttctggcc

SEQ ID NO: 6955 - DNA, 20 bp, Artificial Sequence
  Synthetic
ggcctccggtggaacgttag

SEQ ID NO: 6956 - DNA, 20 bp, Artificial Sequence
  Synthetic
ggagctgctcttatctacgg

SEQ ID NO: 6957 - DNA, 20 bp, Artificial Sequence
  Synthetic
gctggagctgctcttatcta

SEQ ID NO: 6958 - DNA, 20 bp, Artificial Sequence
  Synthetic
gcctccggtggaacgttagg

SEQ ID NO: 6959 - DNA, 20 bp, Artificial Sequence
  Synthetic
gagttgggtagtttggtgaa

SEQ ID NO: 6960 - DNA, 20 bp, Artificial Sequence
  Synthetic
gaacactacctctccggtaa

SEQ ID NO: 6961 - DNA, 20 bp, Artificial Sequence
  Synthetic
gggtagggtggacaagaggg

SEQ ID NO: 6962 - DNA, 20 bp, Artificial Sequence
  Synthetic
ggattctctttcaggacaga

SEQ ID NO: 6963 - DNA, 20 bp, Artificial Sequence
  Synthetic
gtcctacccagtttgctctc

SEQ ID NO: 6964 - DNA, 20 bp, Artificial Sequence
  Synthetic
gagtcagtagtgatggatta

SEQ ID NO: 6965 - DNA, 20 bp, Artificial Sequence
  Synthetic
ggtacatccttggaatgtta

SEQ ID NO: 6966 - DNA, 20 bp, Artificial Sequence
  Synthetic
ggacttgaatgtcctttaac

SEQ ID NO: 6967 - DNA, 20 bp, Artificial Sequence
  Synthetic
gtttacttcctgcttcgccg

SEQ ID NO: 6968 - DNA, 20 bp, Artificial Sequence
  Synthetic
gagtcgccagctgctagggt

SEQ ID NO: 6969 - DNA, 20 bp, Artificial Sequence
  Synthetic
gtcgattggcacctttcacc

SEQ ID NO: 6970 - DNA, 20 bp, Artificial Sequence
  Synthetic
ggagagcaagttcatgaggg

SEQ ID NO: 6971 - DNA, 20 bp, Artificial Sequence
  Synthetic
gagacaaattggaatttaca

SEQ ID NO: 6972 - DNA, 20 bp, Artificial Sequence
  Synthetic
ggctcattccgcacaccgtt

SEQ ID NO: 6973 - DNA, 20 bp, Artificial Sequence
  Synthetic
gtcctgaaagcatttcacct

SEQ ID NO: 6974 - DNA, 20 bp, Artificial Sequence
  Synthetic
gaacaactggtacaggagga

SEQ ID NO: 6975 - DNA, 20 bp, Artificial Sequence
  Synthetic
gtttctgaacactcttgcca

SEQ ID NO: 6976 - DNA, 20 bp, Artificial Sequence
  Synthetic
gctctggtggctggatttgg

SEQ ID NO: 6977 - DNA, 20 bp, Artificial Sequence
  Synthetic
gccctaccattccaactttc

SEQ ID NO: 6978 - DNA, 20 bp, Artificial Sequence
  Synthetic
gtcccatctggaaggagggt

SEQ ID NO: 6979 - DNA, 20 bp, Artificial Sequence
  Synthetic
ggaattctgggatctctcca

SEQ ID NO: 6980 - DNA, 20 bp, Artificial Sequence
  Synthetic
gaatagggtgctgaaccaga

SEQ ID NO: 6981 - DNA, 20 bp, Artificial Sequence
  Synthetic
gctacttccctggctaagtc

SEQ ID NO: 6982 - DNA, 20 bp, Artificial Sequence
  Synthetic
gctcctcagactaaaggatg

SEQ ID NO: 6983 - DNA, 20 bp, Artificial Sequence
  Synthetic
gtgacaataacagccaagcc

SEQ ID NO: 6984 - DNA, 20 bp, Artificial Sequence
  Synthetic
gctggcgacaaggttggaag

SEQ ID NO: 6985 - DNA, 20 bp, Artificial Sequence
  Synthetic
ggctgtgggagaatgggctg

SEQ ID NO: 6986 - DNA, 20 bp, Artificial Sequence
  Synthetic
ggaaagaagctcccgagtgc

SEQ ID NO: 6987 - DNA, 20 bp, Artificial Sequence
  Synthetic
gactgtccaactagtatttc

SEQ ID NO: 6988 - DNA, 20 bp, Artificial Sequence
  Synthetic
gcctttgcaccctttggatg

SEQ ID NO: 6989 - DNA, 20 bp, Artificial Sequence
  Synthetic
ggcagtttcagaggaaacct

SEQ ID NO: 6990 - DNA, 20 bp, Artificial Sequence
  Synthetic
gggttgggagttagaaagag

SEQ ID NO: 6991 - DNA, 20 bp, Artificial Sequence
  Synthetic
gataaacagggcagtttgta

SEQ ID NO: 6992 - DNA, 20 bp, Artificial Sequence
  Synthetic
gcagccacatctcagaaact

SEQ ID NO: 6993 - DNA, 20 bp, Artificial Sequence
  Synthetic
gagtcacacctggccctcca

SEQ ID NO: 6994 - DNA, 20 bp, Artificial Sequence
  Synthetic
ggcctcagtggagactgtcc

SEQ ID NO: 6995 - DNA, 20 bp, Artificial Sequence
  Synthetic
gtaggttataggaaagggaa

SEQ ID NO: 6996 - DNA, 20 bp, Artificial Sequence
  Synthetic
gtggatcccaccatgaggct

SEQ ID NO: 6997 - DNA, 20 bp, Artificial Sequence
  Synthetic
ggaaaggagagcaattatga

SEQ ID NO: 6998 - DNA, 20 bp, Artificial Sequence
  Synthetic
gcgaggaagagggttgagcc

SEQ ID NO: 6999 - DNA, 20 bp, Artificial Sequence
  Synthetic
gaagctttcgggactgggaa

SEQ ID NO: 7000 - DNA, 20 bp, Artificial Sequence
  Synthetic
gctatatcacctcagatcgc

SEQ ID NO: 7001 - DNA, 20 bp, Artificial Sequence
  Synthetic
gtgggatccacgtggaatcg

SEQ ID NO: 7002 - DNA, 20 bp, Artificial Sequence
  Synthetic
gacaaacagctaatctgctt

SEQ ID NO: 7003 - DNA, 20 bp, Artificial Sequence
  Synthetic
ggagcgggtttaggatgcaa

SEQ ID NO: 7004 - DNA, 20 bp, Artificial Sequence
  Synthetic
gggctcggtgttgattggcc

SEQ ID NO: 7005 - DNA, 20 bp, Artificial Sequence
  Synthetic
gtcaccgcagagaagccaag

SEQ ID NO: 7006 - DNA, 20 bp, Artificial Sequence
  Synthetic
gagacagaagccgggagtac

SEQ ID NO: 7007 - DNA, 20 bp, Artificial Sequence
  Synthetic
gccatgccacttgcttgagc

SEQ ID NO: 7008 - DNA, 20 bp, Artificial Sequence
  Synthetic
ggtgtcttagtcttcagtgc

SEQ ID NO: 7009 - DNA, 20 bp, Artificial Sequence
  Synthetic
ggtctgcgccctgcaaacgt

SEQ ID NO: 7010 - DNA, 20 bp, Artificial Sequence
  Synthetic
gagctttccaggtgggccat

SEQ ID NO: 7011 - DNA, 20 bp, Artificial Sequence
  Synthetic
gatgttcgagagactaaggt

SEQ ID NO: 7012 - DNA, 20 bp, Artificial Sequence
  Synthetic
gagtgtgtgattataaacca

SEQ ID NO: 7013 - DNA, 20 bp, Artificial Sequence
  Synthetic
gtcacacattcagagtattt

SEQ ID NO: 7014 - DNA, 20 bp, Artificial Sequence
  Synthetic
gctctttgagacaaggactt

SEQ ID NO: 7015 - DNA, 20 bp, Artificial Sequence
  Synthetic
gcatcgggttccaagccaat

SEQ ID NO: 7016 - DNA, 20 bp, Artificial Sequence
  Synthetic
gtctatgtttctcttagacc

SEQ ID NO: 7017 - DNA, 20 bp, Artificial Sequence
  Synthetic
gcacgatgttcgagagacta

SEQ ID NO: 7018 - DNA, 20 bp, Artificial Sequence
  Synthetic
gacaatgggtaagaaagaga

SEQ ID NO: 7019 - DNA, 20 bp, Artificial Sequence
  Synthetic
gtaatagtatatgccatcaa

SEQ ID NO: 7020 - DNA, 20 bp, Artificial Sequence
  Synthetic
ggacctaatcaaactgcggt

SEQ ID NO: 7021 - DNA, 20 bp, Artificial Sequence
  Synthetic
ggtaaagcgaatcataggag

SEQ ID NO: 7022 - DNA, 20 bp, Artificial Sequence
  Synthetic
gagtgtgcggctgtgcagag

SEQ ID NO: 7023 - DNA, 20 bp, Artificial Sequence
  Synthetic
gcaatcctgaaggtcagcac

SEQ ID NO: 7024 - DNA, 20 bp, Artificial Sequence
  Synthetic
gctcacagcatctcacctta

SEQ ID NO: 7025 - DNA, 20 bp, Artificial Sequence
  Synthetic
gttaatgctcacagtttgat

SEQ ID NO: 7026 - DNA, 20 bp, Artificial Sequence
  Synthetic
gtgagtgacagcctgtttac

SEQ ID NO: 7027 - DNA, 20 bp, Artificial Sequence
  Synthetic
ggaaggtggaaggagtggag

SEQ ID NO: 7028 - DNA, 20 bp, Artificial Sequence
  Synthetic
ggactggtcaggccatcttc

SEQ ID NO: 7029 - DNA, 20 bp, Artificial Sequence
  Synthetic
ggtcaggccatcttctggtt

SEQ ID NO: 7030 - DNA, 20 bp, Artificial Sequence
  Synthetic
gtgttacatacctctgagtt

SEQ ID NO: 7031 - DNA, 20 bp, Artificial Sequence
  Synthetic
ggagtgggagaaatgggctc

SEQ ID NO: 7032 - DNA, 20 bp, Artificial Sequence
  Synthetic
gcctacaagaaactgtatac

SEQ ID NO: 7033 - DNA, 20 bp, Artificial Sequence
  Synthetic
ggcccttgtagatggatcgt

SEQ ID NO: 7034 - DNA, 20 bp, Artificial Sequence
  Synthetic
gaaacagctgggctgcacac

SEQ ID NO: 7035 - DNA, 20 bp, Artificial Sequence
  Synthetic
gttgtgccttactccggagg

SEQ ID NO: 7036 - DNA, 20 bp, Artificial Sequence
  Synthetic
gccactacgacccatcatgc

SEQ ID NO: 7037 - DNA, 20 bp, Artificial Sequence
  Synthetic
gatcagctcatctatagctg

SEQ ID NO: 7038 - DNA, 20 bp, Artificial Sequence
  Synthetic
gctatttagctgagaactct

SEQ ID NO: 7039 - DNA, 20 bp, Artificial Sequence
  Synthetic
ggtggcaagggtacttgggt

SEQ ID NO: 7040 - DNA, 20 bp, Artificial Sequence
  Synthetic
gccatctgtaggctggaacc

SEQ ID NO: 7041 - DNA, 20 bp, Artificial Sequence
  Synthetic
ggacgacaatggatcacaag

SEQ ID NO: 7042 - DNA, 20 bp, Artificial Sequence
  Synthetic
ggcccttatttatcagcttc

SEQ ID NO: 7043 - DNA, 20 bp, Artificial Sequence
  Synthetic
gtggctgcccacgtttactg

SEQ ID NO: 7044 - DNA, 20 bp, Artificial Sequence
  Synthetic
gagaggccagcgcctgtttg

SEQ ID NO: 7045 - DNA, 20 bp, Artificial Sequence
  Synthetic
gtgagatcagccttatcgcc

SEQ ID NO: 7046 - DNA, 20 bp, Artificial Sequence
  Synthetic
ggaaaggtcttgggagatac

SEQ ID NO: 7047 - DNA, 20 bp, Artificial Sequence
  Synthetic
gctttctgagaaagaggaac

SEQ ID NO: 7048 - DNA, 20 bp, Artificial Sequence
  Synthetic
gataaggctgatctcacagg

SEQ ID NO: 7049 - DNA, 20 bp, Artificial Sequence
  Synthetic
gcagcgatcaccggctttaa

SEQ ID NO: 7050 - DNA, 20 bp, Artificial Sequence
  Synthetic
gagttaccagggtcacctgg

SEQ ID NO: 7051 - DNA, 20 bp, Artificial Sequence
  Synthetic
ggaatgcccaatacaaactc

SEQ ID NO: 7052 - DNA, 20 bp, Artificial Sequence
  Synthetic
gctagaaagaacgttattca

SEQ ID NO: 7053 - DNA, 20 bp, Artificial Sequence
  Synthetic
gtctgggtggcatagagctg

SEQ ID NO: 7054 - DNA, 20 bp, Artificial Sequence
  Synthetic
ggctgaggatgtgaaccaat

SEQ ID NO: 7055 - DNA, 20 bp, Artificial Sequence
  Synthetic
gaaagaacgttattcagggt

SEQ ID NO: 7056 - DNA, 20 bp, Artificial Sequence
  Synthetic
gctagacagaggtgggaggg

SEQ ID NO: 7057 - DNA, 20 bp, Artificial Sequence
  Synthetic
gtccttccgggtatgacctg

SEQ ID NO: 7058 - DNA, 20 bp, Artificial Sequence
  Synthetic
gttctctgggcagctcttcc

SEQ ID NO: 7059 - DNA, 20 bp, Artificial Sequence
  Synthetic
ggagaagcaggccaaggctg

SEQ ID NO: 7060 - DNA, 20 bp, Artificial Sequence
  Synthetic
ggacagacttggcctgatct

SEQ ID NO: 7061 - DNA, 20 bp, Artificial Sequence
  Synthetic
gctggcatttcttccagaac

SEQ ID NO: 7062 - DNA, 20 bp, Artificial Sequence
  Synthetic
ggttgggtgacgagacagga

SEQ ID NO: 7063 - DNA, 20 bp, Artificial Sequence
  Synthetic
gtagacgcacttctatgttc

SEQ ID NO: 7064 - DNA, 20 bp, Artificial Sequence
  Synthetic
gtccacacttagcaaattag

SEQ ID NO: 7065 - DNA, 20 bp, Artificial Sequence
  Synthetic
ggagtggactttacctgttc

SEQ ID NO: 7066 - DNA, 20 bp, Artificial Sequence
  Synthetic
gagggcgaagtttgcaaagg

SEQ ID NO: 7067 - DNA, 20 bp, Artificial Sequence
  Synthetic
gcacacaggtgggcgttctg

SEQ ID NO: 7068 - DNA, 20 bp, Artificial Sequence
  Synthetic
gtcctcttagacctgcacac

SEQ ID NO: 7069 - DNA, 20 bp, Artificial Sequence
  Synthetic
gaggattgtggctccgggtt

SEQ ID NO: 7070 - DNA, 20 bp, Artificial Sequence
  Synthetic
gtgctaaatgcctatttaac

SEQ ID NO: 7071 - DNA, 20 bp, Artificial Sequence
  Synthetic
gagttggtttagcaggtctg

SEQ ID NO: 7072 - DNA, 20 bp, Artificial Sequence
  Synthetic
gtggaggctggaacttggaa

SEQ ID NO: 7073 - DNA, 20 bp, Artificial Sequence
  Synthetic
gtcgccatgttggccctcct

SEQ ID NO: 7074 - DNA, 20 bp, Artificial Sequence
  Synthetic
gcccaatgagggagggtgaa

SEQ ID NO: 7075 - DNA, 20 bp, Artificial Sequence
  Synthetic
ggagaaagaaggcgaaatgg

SEQ ID NO: 7076 - DNA, 20 bp, Artificial Sequence
  Synthetic
gctccgtgagcggtagggat

SEQ ID NO: 7077 - DNA, 20 bp, Artificial Sequence
  Synthetic
gaaataggccggaatgggat

SEQ ID NO: 7078 - DNA, 20 bp, Artificial Sequence
  Synthetic
gggccttgcagaggaaaggc

SEQ ID NO: 7079 - DNA, 20 bp, Artificial Sequence
  Synthetic
gttccattgtctagagtcct

SEQ ID NO: 7080 - DNA, 20 bp, Artificial Sequence
  Synthetic
ggatgcttggatagtctgag

SEQ ID NO: 7081 - DNA, 20 bp, Artificial Sequence
  Synthetic
ggatggatgaccactataaa

SEQ ID NO: 7082 - DNA, 20 bp, Artificial Sequence
  Synthetic
gttctgacaaagtgtagaat

SEQ ID NO: 7083 - DNA, 20 bp, Artificial Sequence
  Synthetic
gtagagatgggagccgacct

SEQ ID NO: 7084 - DNA, 20 bp, Artificial Sequence
  Synthetic
gaactgaaattgctggtgat

SEQ ID NO: 7085 - DNA, 20 bp, Artificial Sequence
  Synthetic
gagtgggtagaaagctcagg

SEQ ID NO: 7086 - DNA, 20 bp, Artificial Sequence
  Synthetic
gatctcttctgtctttcaga

SEQ ID NO: 7087 - DNA, 20 bp, Artificial Sequence
  Synthetic
gctacagcatcgcttcctgc

SEQ ID NO: 7088 - DNA, 20 bp, Artificial Sequence
  Synthetic
gggctgactatcctgctggg

SEQ ID NO: 7089 - DNA, 20 bp, Artificial Sequence
  Synthetic
gagatgtataagctctttac

SEQ ID NO: 7090 - DNA, 20 bp, Artificial Sequence
  Synthetic
gcccatacattctgttccca

SEQ ID NO: 7091 - DNA, 20 bp, Artificial Sequence
  Synthetic
gtctgaagctgagaggatca

SEQ ID NO: 7092 - DNA, 20 bp, Artificial Sequence
  Synthetic
ggaagcatctagagtgacgt

SEQ ID NO: 7093 - DNA, 20 bp, Artificial Sequence
  Synthetic
gagcgcatcgccttcacctc

SEQ ID NO: 7094 - DNA, 20 bp, Artificial Sequence
  Synthetic
gcttgacaggcaccacaggt

SEQ ID NO: 7095 - DNA, 20 bp, Artificial Sequence
  Synthetic
gagaaagctaaacctacctg

SEQ ID NO: 7096 - DNA, 20 bp, Artificial Sequence
  Synthetic
gagacacatacatccctgct

SEQ ID NO: 7097 - DNA, 20 bp, Artificial Sequence
  Synthetic
gtgtttaggacagctcaggc

SEQ ID NO: 7098 - DNA, 20 bp, Artificial Sequence
  Synthetic
gactagctagaaacgttata

SEQ ID NO: 7099 - DNA, 20 bp, Artificial Sequence
  Synthetic
gtgtcacagtgactcaactg

SEQ ID NO: 7100 - DNA, 20 bp, Artificial Sequence
  Synthetic
gctgctgctactgagcaaac

SEQ ID NO: 7101 - DNA, 20 bp, Artificial Sequence
  Synthetic
gcattgaggatgtcaaagga

SEQ ID NO: 7102 - DNA, 20 bp, Artificial Sequence
  Synthetic
gctctaagtgcccgcctcca

SEQ ID NO: 7103 - DNA, 20 bp, Artificial Sequence
  Synthetic
ggcaaatgagagccgggaag

SEQ ID NO: 7104 - DNA, 20 bp, Artificial Sequence
  Synthetic
gactttcttggttaagaagc

SEQ ID NO: 7105 - DNA, 20 bp, Artificial Sequence
  Synthetic
gacaaccttgtgagacctct

SEQ ID NO: 7106 - DNA, 20 bp, Artificial Sequence
  Synthetic
ggaactctccaattcatgcc

SEQ ID NO: 7107 - DNA, 20 bp, Artificial Sequence
  Synthetic
gaggaaggcggtgcctcaat

SEQ ID NO: 7108 - DNA, 20 bp, Artificial Sequence
  Synthetic
gttgtctaaagagaaccaca

SEQ ID NO: 7109 - DNA, 20 bp, Artificial Sequence
  Synthetic
gagctgacccacatgcagcc

SEQ ID NO: 7110 - DNA, 20 bp, Artificial Sequence
  Synthetic
gcaaagaaagcagggcgaag

SEQ ID NO: 7111 - DNA, 20 bp, Artificial Sequence
  Synthetic
ggctcggctctcattggatg

SEQ ID NO: 7112 - DNA, 20 bp, Artificial Sequence
  Synthetic
gtactggtatccaggaaaca

SEQ ID NO: 7113 - DNA, 20 bp, Artificial Sequence
  Synthetic
gcgttccacatttattgacg

SEQ ID NO: 7114 - DNA, 20 bp, Artificial Sequence
  Synthetic
gtggtcattgtacttcacat

SEQ ID NO: 7115 - DNA, 20 bp, Artificial Sequence
  Synthetic
ggatctctggaaaccaggag

SEQ ID NO: 7116 - DNA, 20 bp, Artificial Sequence
  Synthetic
gatgccatggaaatctaacc

SEQ ID NO: 7117 - DNA, 20 bp, Artificial Sequence
  Synthetic
gcaggagagaataaagtgat

SEQ ID NO: 7118 - DNA, 20 bp, Artificial Sequence
  Synthetic
ggtttattctgttcctagca

SEQ ID NO: 7119 - DNA, 20 bp, Artificial Sequence
  Synthetic
ggttgggcgggcatctgaaa

SEQ ID NO: 7120 - DNA, 20 bp, Artificial Sequence
  Synthetic
gcgcactgggatcagagggt

SEQ ID NO: 7121 - DNA, 20 bp, Artificial Sequence
  Synthetic
ggaaactgaggaagacattg

SEQ ID NO: 7122 - DNA, 20 bp, Artificial Sequence
  Synthetic
gtgaggtaggatgggctcca

SEQ ID NO: 7123 - DNA, 20 bp, Artificial Sequence
  Synthetic
gcttagtgctgggtgtgggc

SEQ ID NO: 7124 - DNA, 20 bp, Artificial Sequence
  Synthetic
gctcttaactcagaagtggt

SEQ ID NO: 7125 - DNA, 20 bp, Artificial Sequence
  Synthetic
gcctgatgccctcaaaggcc

SEQ ID NO: 7126 - DNA, 20 bp, Artificial Sequence
  Synthetic
gaacgcaacagatgtgtcct

SEQ ID NO: 7127 - DNA, 20 bp, Artificial Sequence
  Synthetic
gaagaacagagacaaatgga

SEQ ID NO: 7128 - DNA, 20 bp, Artificial Sequence
  Synthetic
gtagtcagcccagcctgctg

SEQ ID NO: 7129 - DNA, 20 bp, Artificial Sequence
  Synthetic
gggaaagccacctgacattc

SEQ ID NO: 7130 - DNA, 20 bp, Artificial Sequence
  Synthetic
gcttcctggaggtggtgcag

SEQ ID NO: 7131 - DNA, 20 bp, Artificial Sequence
  Synthetic
gagggatggacagagagggt

SEQ ID NO: 7132 - DNA, 20 bp, Artificial Sequence
  Synthetic
gccctcaaaggcccgggaaa

SEQ ID NO: 7133 - DNA, 20 bp, Artificial Sequence
  Synthetic
gccttcctggatgtgtgcta

SEQ ID NO: 7134 - DNA, 20 bp, Artificial Sequence
  Synthetic
gctgcccaaatgtgccttcc

SEQ ID NO: 7135 - DNA, 20 bp, Artificial Sequence
  Synthetic
gatgctggcctcaggatgac

SEQ ID NO: 7136 - DNA, 20 bp, Artificial Sequence
  Synthetic
gagtttctgtttgttctaag

SEQ ID NO: 7137 - DNA, 20 bp, Artificial Sequence
  Synthetic
gagttcctagtgaaggtcca

SEQ ID NO: 7138 - DNA, 20 bp, Artificial Sequence
  Synthetic
gagatgtgcagacagattgt

SEQ ID NO: 7139 - DNA, 20 bp, Artificial Sequence
  Synthetic
ggagctcttggagccagtgg

SEQ ID NO: 7140 - DNA, 20 bp, Artificial Sequence
  Synthetic
gatgccaggctgcatagcaa

SEQ ID NO: 7141 - DNA, 20 bp, Artificial Sequence
  Synthetic
gaaggctgagaagcccagct

SEQ ID NO: 7142 - DNA, 20 bp, Artificial Sequence
  Synthetic
ggaggaaggagggaaggcta

SEQ ID NO: 7143 - DNA, 20 bp, Artificial Sequence
  Synthetic
gccaaacagaccatggaaca

SEQ ID NO: 7144 - DNA, 20 bp, Artificial Sequence
  Synthetic
gaagggtcagagcaaggcca

SEQ ID NO: 7145 - DNA, 20 bp, Artificial Sequence
  Synthetic
gcgcaaggacctggaagacc

SEQ ID NO: 7146 - DNA, 20 bp, Artificial Sequence
  Synthetic
gttctgtcagccacgggagt

SEQ ID NO: 7147 - DNA, 20 bp, Artificial Sequence
  Synthetic
gagctacacactgtatctgc

SEQ ID NO: 7148 - DNA, 20 bp, Artificial Sequence
  Synthetic
ggctgtgctccagcacaaac

SEQ ID NO: 7149 - DNA, 20 bp, Artificial Sequence
  Synthetic
gtgtggtcaccgcctagagg

SEQ ID NO: 7150 - DNA, 20 bp, Artificial Sequence
  Synthetic
ggctcaaagatgcgcaagag

SEQ ID NO: 7151 - DNA, 20 bp, Artificial Sequence
  Synthetic
gttgccctgaggtgtgctag

SEQ ID NO: 7152 - DNA, 20 bp, Artificial Sequence
  Synthetic
gactgtgctcaccagcaagg

SEQ ID NO: 7153 - DNA, 20 bp, Artificial Sequence
  Synthetic
gctgtatatcagctgtcacc

SEQ ID NO: 7154 - DNA, 20 bp, Artificial Sequence
  Synthetic
gttaagtgcagaggcgggaa

SEQ ID NO: 7155 - DNA, 20 bp, Artificial Sequence
  Synthetic
gagcctaggagagaagagag

SEQ ID NO: 7156 - DNA, 20 bp, Artificial Sequence
  Synthetic
gttgtgggacaggaatctaa

SEQ ID NO: 7157 - DNA, 20 bp, Artificial Sequence
  Synthetic
ggctgtggtgtctgagttgt

SEQ ID NO: 7158 - DNA, 20 bp, Artificial Sequence
  Synthetic
gctcttagaatgaagagcct

SEQ ID NO: 7159 - DNA, 20 bp, Artificial Sequence
  Synthetic
gggaggagtaaggttggctg

SEQ ID NO: 7160 - DNA, 20 bp, Artificial Sequence
  Synthetic
ggaagtgttgctccagctgt

SEQ ID NO: 7161 - DNA, 20 bp, Artificial Sequence
  Synthetic
gtcactctcatactctttct

SEQ ID NO: 7162 - DNA, 20 bp, Artificial Sequence
  Synthetic
ggaggactgaggatacagtt

SEQ ID NO: 7163 - DNA, 20 bp, Artificial Sequence
  Synthetic
gattcccaagtggaggactg

SEQ ID NO: 7164 - DNA, 20 bp, Artificial Sequence
  Synthetic
gacaactaggctcaacgtca

SEQ ID NO: 7165 - DNA, 20 bp, Artificial Sequence
  Synthetic
gagaatgctggccctagatg

SEQ ID NO: 7166 - DNA, 20 bp, Artificial Sequence
  Synthetic
gttcctaagtcacagggccc

SEQ ID NO: 7167 - DNA, 20 bp, Artificial Sequence
  Synthetic
gaggacctgagcccagctac

SEQ ID NO: 7168 - DNA, 20 bp, Artificial Sequence
  Synthetic
gacctctgagtccttctggc

SEQ ID NO: 7169 - DNA, 20 bp, Artificial Sequence
  Synthetic
gctccacagattggtttact

SEQ ID NO: 7170 - DNA, 20 bp, Artificial Sequence
  Synthetic
gtctgcagtgcttaaagggt

SEQ ID NO: 7171 - DNA, 20 bp, Artificial Sequence
  Synthetic
gcttcttctgtatcaggcca

SEQ ID NO: 7172 - DNA, 20 bp, Artificial Sequence
  Synthetic
ggaacaggtaaagcaaggga

SEQ ID NO: 7173 - DNA, 20 bp, Artificial Sequence
  Synthetic
ggactactcaactgcaagca

SEQ ID NO: 7174 - DNA, 20 bp, Artificial Sequence
  Synthetic
gtcctctctgctccaatggt

SEQ ID NO: 7175 - DNA, 20 bp, Artificial Sequence
  Synthetic
ggacctaagtgtatactgag

SEQ ID NO: 7176 - DNA, 20 bp, Artificial Sequence
  Synthetic
ggatgggataagtgtgactt

SEQ ID NO: 7177 - DNA, 20 bp, Artificial Sequence
  Synthetic
gaataacaacctagctcctg

SEQ ID NO: 7178 - DNA, 20 bp, Artificial Sequence
  Synthetic
ggagctaggtgccagctgaa

SEQ ID NO: 7179 - DNA, 20 bp, Artificial Sequence
  Synthetic
gaggtgtgggaccagtgtgg

SEQ ID NO: 7180 - DNA, 20 bp, Artificial Sequence
  Synthetic
gctctcgacaaagttgctcc

SEQ ID NO: 7181 - DNA, 20 bp, Artificial Sequence
  Synthetic
gtcgagagcccggaaataga

SEQ ID NO: 7182 - DNA, 20 bp, Artificial Sequence
  Synthetic
gatgggataagtgtgactta

SEQ ID NO: 7183 - DNA, 20 bp, Artificial Sequence
  Synthetic
gacttggaagtttaggagac

SEQ ID NO: 7184 - DNA, 20 bp, Artificial Sequence
  Synthetic
gacatatctctggagggcag

SEQ ID NO: 7185 - DNA, 20 bp, Artificial Sequence
  Synthetic
gcacaggcctgaaagtacag

SEQ ID NO: 7186 - DNA, 20 bp, Artificial Sequence
  Synthetic
ggcagacacacatctggagg

SEQ ID NO: 7187 - DNA, 20 bp, Artificial Sequence
  Synthetic
gacctcgcagccagacttgt

SEQ ID NO: 7188 - DNA, 20 bp, Artificial Sequence
  Synthetic
gtgttacaaagcccaggtta

SEQ ID NO: 7189 - DNA, 20 bp, Artificial Sequence
  Synthetic
gactctcagacccttaacct

SEQ ID NO: 7190 - DNA, 20 bp, Artificial Sequence
  Synthetic
gtggcaagtcacaaacttcc

SEQ ID NO: 7191 - DNA, 20 bp, Artificial Sequence
  Synthetic
gaggactgcagggcagaaga

SEQ ID NO: 7192 - DNA, 20 bp, Artificial Sequence
  Synthetic
gttgaaactatcctagagga

SEQ ID NO: 7193 - DNA, 20 bp, Artificial Sequence
  Synthetic
gttctaagtccagatttaaa

SEQ ID NO: 7194 - DNA, 20 bp, Artificial Sequence
  Synthetic
gctggctttaatgtagactt

SEQ ID NO: 7195 - DNA, 20 bp, Artificial Sequence
  Synthetic
gcctgagatgcagctggcta

SEQ ID NO: 7196 - DNA, 20 bp, Artificial Sequence
  Synthetic
ggtatgtgctcctaagaggc

SEQ ID NO: 7197 - DNA, 20 bp, Artificial Sequence
  Synthetic
ggcttatcctgtctttgtgt

SEQ ID NO: 7198 - DNA, 20 bp, Artificial Sequence
  Synthetic
gactttggcaaacaatggct

SEQ ID NO: 7199 - DNA, 20 bp, Artificial Sequence
  Synthetic
gccctcctgcacacatacaa

SEQ ID NO: 7200 - DNA, 20 bp, Artificial Sequence
  Synthetic
gctgcattaaattcaagtgg

SEQ ID NO: 7201 - DNA, 20 bp, Artificial Sequence
  Synthetic
gactctaaagactcaatgga

SEQ ID NO: 7202 - DNA, 20 bp, Artificial Sequence
  Synthetic
gcttgctatggaatcccacg

SEQ ID NO: 7203 - DNA, 20 bp, Artificial Sequence
  Synthetic
ggaagacctgcccaagagaa

SEQ ID NO: 7204 - DNA, 20 bp, Artificial Sequence
  Synthetic
gttctgtgatgcctttgtga

SEQ ID NO: 7205 - DNA, 20 bp, Artificial Sequence
  Synthetic
gacagtcatcaaaggcacaa

SEQ ID NO: 7206 - DNA, 20 bp, Artificial Sequence
  Synthetic
gtgcggtgcaaaccgcagac

SEQ ID NO: 7207 - DNA, 20 bp, Artificial Sequence
  Synthetic
gacacttggtcctcgagcct

SEQ ID NO: 7208 - DNA, 20 bp, Artificial Sequence
  Synthetic
ggccaatctctgccgctgat

SEQ ID NO: 7209 - DNA, 20 bp, Artificial Sequence
  Synthetic
gttctctctgtgttctgcct

SEQ ID NO: 7210 - DNA, 20 bp, Artificial Sequence
  Synthetic
ggcttgcgcaagctcagtct

SEQ ID NO: 7211 - DNA, 20 bp, Artificial Sequence
  Synthetic
ggctcgaggaccaagtgtcc

SEQ ID NO: 7212 - DNA, 20 bp, Artificial Sequence
  Synthetic
ggagcagctgcaccatttct

SEQ ID NO: 7213 - DNA, 20 bp, Artificial Sequence
  Synthetic
gactaaatgggcaacgtcta

SEQ ID NO: 7214 - DNA, 20 bp, Artificial Sequence
  Synthetic
ggaactaccgaagctaccca

SEQ ID NO: 7215 - DNA, 20 bp, Artificial Sequence
  Synthetic
ggattgacatcaggatgagt

SEQ ID NO: 7216 - DNA, 20 bp, Artificial Sequence
  Synthetic
ggatgccacttcacacggag

SEQ ID NO: 7217 - DNA, 20 bp, Artificial Sequence
  Synthetic
ggttgcctctccgtgtgaag

SEQ ID NO: 7218 - DNA, 20 bp, Artificial Sequence
  Synthetic
gagctgcagagcagaggaca

SEQ ID NO: 7219 - DNA, 20 bp, Artificial Sequence
  Synthetic
gaagagtggacacacagacc

SEQ ID NO: 7220 - DNA, 20 bp, Artificial Sequence
  Synthetic
ggctaagagctgcagagcag

SEQ ID NO: 7221 - DNA, 20 bp, Artificial Sequence
  Synthetic
gcttatgttctgtttagcaa

SEQ ID NO: 7222 - DNA, 20 bp, Artificial Sequence
  Synthetic
gggaaaggaaactgaaacca

SEQ ID NO: 7223 - DNA, 20 bp, Artificial Sequence
  Synthetic
gagctgcagtgtagacaggg

SEQ ID NO: 7224 - DNA, 20 bp, Artificial Sequence
  Synthetic
ggagtggatcacccaggtaa

SEQ ID NO: 7225 - DNA, 20 bp, Artificial Sequence
  Synthetic
gagtggatcacccaggtaat

SEQ ID NO: 7226 - DNA, 20 bp, Artificial Sequence
  Synthetic
gttatatatacacctaggga

SEQ ID NO: 7227 - DNA, 20 bp, Artificial Sequence
  Synthetic
gtgggaatcagccacttagg

SEQ ID NO: 7228 - DNA, 20 bp, Artificial Sequence
  Synthetic
gtgggaaagtgtggaagaac

SEQ ID NO: 7229 - DNA, 20 bp, Artificial Sequence
  Synthetic
ggccattccttaattatgca

SEQ ID NO: 7230 - DNA, 20 bp, Artificial Sequence
  Synthetic
ggagaggccatagaatccac

SEQ ID NO: 7231 - DNA, 20 bp, Artificial Sequence
  Synthetic
gtaattactagattgcgtgg

SEQ ID NO: 7232 - DNA, 20 bp, Artificial Sequence
  Synthetic
gccagaaccatgctcttcct

SEQ ID NO: 7233 - DNA, 20 bp, Artificial Sequence
  Synthetic
gctccagcaggttcagctcc

SEQ ID NO: 7234 - DNA, 20 bp, Artificial Sequence
  Synthetic
gcacctatgacaaagggaag

SEQ ID NO: 7235 - DNA, 20 bp, Artificial Sequence
  Synthetic
gtctaggatttcactgtgtg

SEQ ID NO: 7236 - DNA, 20 bp, Artificial Sequence
  Synthetic
gacttcaccaagaactttcc

SEQ ID NO: 7237 - DNA, 20 bp, Artificial Sequence
  Synthetic
ggctcagactcactccttat

SEQ ID NO: 7238 - DNA, 20 bp, Artificial Sequence
  Synthetic
gagcacctatgacaaaggga

SEQ ID NO: 7239 - DNA, 20 bp, Artificial Sequence
  Synthetic
gagtctcgatctggtggctt

SEQ ID NO: 7240 - DNA, 20 bp, Artificial Sequence
  Synthetic
gccattctggacagcttagg

SEQ ID NO: 7241 - DNA, 20 bp, Artificial Sequence
  Synthetic
ggcttcagtgtacctgggct

SEQ ID NO: 7242 - DNA, 20 bp, Artificial Sequence
  Synthetic
ggagatagggcagaagaaac

SEQ ID NO: 7243 - DNA, 20 bp, Artificial Sequence
  Synthetic
gacccttctaggtcactgga

SEQ ID NO: 7244 - DNA, 20 bp, Artificial Sequence
  Synthetic
gtcaatgcctggaagtgggt

SEQ ID NO: 7245 - DNA, 20 bp, Artificial Sequence
  Synthetic
gagagagccagaagcaaggc

SEQ ID NO: 7246 - DNA, 20 bp, Artificial Sequence
  Synthetic
gcccattgcctcatggtagg

SEQ ID NO: 7247 - DNA, 20 bp, Artificial Sequence
  Synthetic
gcatgggcagtaccaaagga

SEQ ID NO: 7248 - DNA, 20 bp, Artificial Sequence
  Synthetic
gggtttgcaaggaggatcag

SEQ ID NO: 7249 - DNA, 20 bp, Artificial Sequence
  Synthetic
ggcctgcaaagcacgtggta

SEQ ID NO: 7250 - DNA, 20 bp, Artificial Sequence
  Synthetic
gcagggagccagctaccttt

SEQ ID NO: 7251 - DNA, 20 bp, Artificial Sequence
  Synthetic
gcacttctgtatcccaaggc

SEQ ID NO: 7252 - DNA, 20 bp, Artificial Sequence
  Synthetic
gggctctcagattccctaag

SEQ ID NO: 7253 - DNA, 20 bp, Artificial Sequence
  Synthetic
gtgtttggagccacaaagga

SEQ ID NO: 7254 - DNA, 20 bp, Artificial Sequence
  Synthetic
gggcaatccactgatccagt

SEQ ID NO: 7255 - DNA, 20 bp, Artificial Sequence
  Synthetic
ggaccatacagcttctatgt

SEQ ID NO: 7256 - DNA, 20 bp, Artificial Sequence
  Synthetic
gaggtgatagcttacaggta

SEQ ID NO: 7257 - DNA, 20 bp, Artificial Sequence
  Synthetic
gttcttcaacacaagaggta

SEQ ID NO: 7258 - DNA, 20 bp, Artificial Sequence
  Synthetic
gggagtgacaggtttatcca

SEQ ID NO: 7259 - DNA, 20 bp, Artificial Sequence
  Synthetic
gcctcctttcgtcatgatcg

SEQ ID NO: 7260 - DNA, 20 bp, Artificial Sequence
  Synthetic
gagccttcaagtacaactgg

SEQ ID NO: 7261 - DNA, 20 bp, Artificial Sequence
  Synthetic
gggaatggatcagtgctaag

SEQ ID NO: 7262 - DNA, 20 bp, Artificial Sequence
  Synthetic
ggaagtgtgagtccaagaac

SEQ ID NO: 7263 - DNA, 20 bp, Artificial Sequence
  Synthetic
gctccattgaaccacactgg

SEQ ID NO: 7264 - DNA, 20 bp, Artificial Sequence
  Synthetic
gtgggcacctggaagcacat

SEQ ID NO: 7265 - DNA, 20 bp, Artificial Sequence
  Synthetic
gaacccttagctcagaattc

SEQ ID NO: 7266 - DNA, 20 bp, Artificial Sequence
  Synthetic
gtgcaaacttagatccaccc

SEQ ID NO: 7267 - DNA, 20 bp, Artificial Sequence
  Synthetic
gagggtaagttgtgagggta

SEQ ID NO: 7268 - DNA, 20 bp, Artificial Sequence
  Synthetic
gatactgtagggaggaagtg

SEQ ID NO: 7269 - DNA, 20 bp, Artificial Sequence
  Synthetic
gatgcacatgcgtgagttca

SEQ ID NO: 7270 - DNA, 20 bp, Artificial Sequence
  Synthetic
gcagagtggcttaagctgtg

SEQ ID NO: 7271 - DNA, 20 bp, Artificial Sequence
  Synthetic
gaataacattggcctcctgg

SEQ ID NO: 7272 - DNA, 20 bp, Artificial Sequence
  Synthetic
ggcttaaggcatggtggctc

SEQ ID NO: 7273 - DNA, 20 bp, Artificial Sequence
  Synthetic
gcgttccacgttcattggtt

SEQ ID NO: 7274 - DNA, 20 bp, Artificial Sequence
  Synthetic
gttgggatgtgggagggttc

SEQ ID NO: 7275 - DNA, 20 bp, Artificial Sequence
  Synthetic
gacctcacccagctgttgga

SEQ ID NO: 7276 - DNA, 20 bp, Artificial Sequence
  Synthetic
gatcagtcacaagggagcag

SEQ ID NO: 7277 - DNA, 20 bp, Artificial Sequence
  Synthetic
ggctctgacagccatcaggt

SEQ ID NO: 7278 - DNA, 20 bp, Artificial Sequence
  Synthetic
gttcagggcttaaggcatgg

SEQ ID NO: 7279 - DNA, 20 bp, Artificial Sequence
  Synthetic
gcgtgaggctacaggaaggg

SEQ ID NO: 7280 - DNA, 20 bp, Artificial Sequence
  Synthetic
gtagaaagtaaatgtggtag

SEQ ID NO: 7281 - DNA, 20 bp, Artificial Sequence
  Synthetic
gtggccttcgtgccattggg

SEQ ID NO: 7282 - DNA, 20 bp, Artificial Sequence
  Synthetic
gtagacaggagtcacggtgg

SEQ ID NO: 7283 - DNA, 20 bp, Artificial Sequence
  Synthetic
ggatttcctccgcgagactt

SEQ ID NO: 7284 - DNA, 20 bp, Artificial Sequence
  Synthetic
gtacttagctcctgtattct

SEQ ID NO: 7285 - DNA, 20 bp, Artificial Sequence
  Synthetic
ggcacgaaggccacgtgaag

SEQ ID NO: 7286 - DNA, 20 bp, Artificial Sequence
  Synthetic
ggccctttccagggccttaa

SEQ ID NO: 7287 - DNA, 20 bp, Artificial Sequence
  Synthetic
gctataatagtctccgtgcc

SEQ ID NO: 7288 - DNA, 20 bp, Artificial Sequence
  Synthetic
gaggcggaacaccaagtcca

SEQ ID NO: 7289 - DNA, 20 bp, Artificial Sequence
  Synthetic
ggagtagacaggagtcacgg

SEQ ID NO: 7290 - DNA, 20 bp, Artificial Sequence
  Synthetic
gctataggctgccctggagg

SEQ ID NO: 7291 - DNA, 20 bp, Artificial Sequence
  Synthetic
gaagctctcaaggcgagaaa

SEQ ID NO: 7292 - DNA, 20 bp, Artificial Sequence
  Synthetic
gctcagtctcatctccactg

SEQ ID NO: 7293 - DNA, 20 bp, Artificial Sequence
  Synthetic
gaaaggagaaatgcacctaa

SEQ ID NO: 7294 - DNA, 20 bp, Artificial Sequence
  Synthetic
gcgggtgactgagaaactga

SEQ ID NO: 7295 - DNA, 20 bp, Artificial Sequence
  Synthetic
gatttcggccatgggtggct

SEQ ID NO: 7296 - DNA, 20 bp, Artificial Sequence
  Synthetic
gccagacaagaccaagctag

SEQ ID NO: 7297 - DNA, 20 bp, Artificial Sequence
  Synthetic
gcctctttgaactgaattcg

SEQ ID NO: 7298 - DNA, 20 bp, Artificial Sequence
  Synthetic
gtcagggttcagttgtaggg

SEQ ID NO: 7299 - DNA, 20 bp, Artificial Sequence
  Synthetic
gcaacaacctgtccaatcaa

SEQ ID NO: 7300 - DNA, 20 bp, Artificial Sequence
  Synthetic
gaacctctgccgggagagtg

SEQ ID NO: 7301 - DNA, 20 bp, Artificial Sequence
  Synthetic
gtgattctctttcacagtcg

SEQ ID NO: 7302 - DNA, 20 bp, Artificial Sequence
  Synthetic
gcctgagacttcctggaact

SEQ ID NO: 7303 - DNA, 20 bp, Artificial Sequence
  Synthetic
gagtctccctgggaagtctt

SEQ ID NO: 7304 - DNA, 20 bp, Artificial Sequence
  Synthetic
gcgtttaacctctggcgtga

SEQ ID NO: 7305 - DNA, 20 bp, Artificial Sequence
  Synthetic
ggtgctcattgcaggagggt

SEQ ID NO: 7306 - DNA, 20 bp, Artificial Sequence
  Synthetic
ggagcaccgagatcgggatg

SEQ ID NO: 7307 - DNA, 20 bp, Artificial Sequence
  Synthetic
gcaccagccagtttgtgttg

SEQ ID NO: 7308 - DNA, 20 bp, Artificial Sequence
  Synthetic
ggaataaatctcggtggagg

SEQ ID NO: 7309 - DNA, 20 bp, Artificial Sequence
  Synthetic
gggcagaggagggtagtcta

SEQ ID NO: 7310 - DNA, 20 bp, Artificial Sequence
  Synthetic
ggtgtgatcctcaccctgtg

SEQ ID NO: 7311 - DNA, 20 bp, Artificial Sequence
  Synthetic
gtcgggttgtttgtagggag

SEQ ID NO: 7312 - DNA, 20 bp, Artificial Sequence
  Synthetic
gggttcctacaatgtaccta

SEQ ID NO: 7313 - DNA, 20 bp, Artificial Sequence
  Synthetic
gccaccttagctggacaaga

SEQ ID NO: 7314 - DNA, 20 bp, Artificial Sequence
  Synthetic
ggaaagacggaggaaacgga

SEQ ID NO: 7315 - DNA, 20 bp, Artificial Sequence
  Synthetic
gataagcgcctcggccatta

SEQ ID NO: 7316 - DNA, 20 bp, Artificial Sequence
  Synthetic
gaatgttaaaggaaagtagg

SEQ ID NO: 7317 - DNA, 20 bp, Artificial Sequence
  Synthetic
gaaacggacgggcaattcca

SEQ ID NO: 7318 - DNA, 20 bp, Artificial Sequence
  Synthetic
gagagatcgaggcgctggtg

SEQ ID NO: 7319 - DNA, 20 bp, Artificial Sequence
  Synthetic
gaagtggcgtcggtctgctt

SEQ ID NO: 7320 - DNA, 20 bp, Artificial Sequence
  Synthetic
gatggacatgtattcaatat

SEQ ID NO: 7321 - DNA, 20 bp, Artificial Sequence
  Synthetic
gcggtgtcctataaaggctg

SEQ ID NO: 7322 - DNA, 20 bp, Artificial Sequence
  Synthetic
ggaacagttaagtacagcta

SEQ ID NO: 7323 - DNA, 20 bp, Artificial Sequence
  Synthetic
gattaaagtaaggagtccta

SEQ ID NO: 7324 - DNA, 20 bp, Artificial Sequence
  Synthetic
ggacatggttatttcaggga

SEQ ID NO: 7325 - DNA, 20 bp, Artificial Sequence
  Synthetic
gtcatgggccatcaggtggt

SEQ ID NO: 7326 - DNA, 20 bp, Artificial Sequence
  Synthetic
gtctctgccacagcctttat

SEQ ID NO: 7327 - DNA, 20 bp, Artificial Sequence
  Synthetic
ggtagcattggtctctccca

SEQ ID NO: 7328 - DNA, 20 bp, Artificial Sequence
  Synthetic
gaaagatacaggagagaaga

SEQ ID NO: 7329 - DNA, 20 bp, Artificial Sequence
  Synthetic
gcctagaaccttggtgcaga

SEQ ID NO: 7330 - DNA, 20 bp, Artificial Sequence
  Synthetic
gtttccagacccacccaaag

SEQ ID NO: 7331 - DNA, 20 bp, Artificial Sequence
  Synthetic
gcctgtagacactagaatta

SEQ ID NO: 7332 - DNA, 20 bp, Artificial Sequence
  Synthetic
gggaggaacttcagaaggaa

SEQ ID NO: 7333 - DNA, 20 bp, Artificial Sequence
  Synthetic
gaatcctgcgggtagggaaa

SEQ ID NO: 7334 - DNA, 20 bp, Artificial Sequence
  Synthetic
ggtatgagaatcctgcgggt

SEQ ID NO: 7335 - DNA, 20 bp, Artificial Sequence
  Synthetic
gcgcagttgggtgtgtgtgg

SEQ ID NO: 7336 - DNA, 20 bp, Artificial Sequence
  Synthetic
gtgcataaggtcctttgctt

SEQ ID NO: 7337 - DNA, 20 bp, Artificial Sequence
  Synthetic
ggtttccagacccacccaaa

SEQ ID NO: 7338 - DNA, 20 bp, Artificial Sequence
  Synthetic
gtatgagaatcctgcgggta

SEQ ID NO: 7339 - DNA, 20 bp, Artificial Sequence
  Synthetic
ggtttccagacacacccaaa

SEQ ID NO: 7340 - DNA, 20 bp, Artificial Sequence
  Synthetic
gagtagctgtttctgtcgct

SEQ ID NO: 7341 - DNA, 20 bp, Artificial Sequence
  Synthetic
gagctggtgtgaattagaac

SEQ ID NO: 7342 - DNA, 20 bp, Artificial Sequence
  Synthetic
gtgccgtttgctccagcaac

SEQ ID NO: 7343 - DNA, 20 bp, Artificial Sequence
  Synthetic
ggcgttcggtggatcgagtc

SEQ ID NO: 7344 - DNA, 20 bp, Artificial Sequence
  Synthetic
gcccagcactcagttgtgca

SEQ ID NO: 7345 - DNA, 20 bp, Artificial Sequence
  Synthetic
ggtccgactgcctaaggctg

SEQ ID NO: 7346 - DNA, 20 bp, Artificial Sequence
  Synthetic
ggaagattgaggtgggagcc

SEQ ID NO: 7347 - DNA, 20 bp, Artificial Sequence
  Synthetic
gtttgaggagatacaaccca

SEQ ID NO: 7348 - DNA, 20 bp, Artificial Sequence
  Synthetic
gagtcccacgtgaggatgta

SEQ ID NO: 7349 - DNA, 20 bp, Artificial Sequence
  Synthetic
gcacctgggtaagagagctc

SEQ ID NO: 7350 - DNA, 20 bp, Artificial Sequence
  Synthetic
ggactaagaggtgtaagctc

SEQ ID NO: 7351 - DNA, 20 bp, Artificial Sequence
  Synthetic
gttgctgctacagcccggga

SEQ ID NO: 7352 - DNA, 20 bp, Artificial Sequence
  Synthetic
gagaaattcagaccgcatgg

SEQ ID NO: 7353 - DNA, 20 bp, Artificial Sequence
  Synthetic
gaaggtcttatactagggta

SEQ ID NO: 7354 - DNA, 20 bp, Artificial Sequence
  Synthetic
gggaacttcaggaattctac

SEQ ID NO: 7355 - DNA, 20 bp, Artificial Sequence
  Synthetic
ggtactgtcaggcagaggtg

SEQ ID NO: 7356 - DNA, 20 bp, Artificial Sequence
  Synthetic
gcaactaagtggaaggatca

SEQ ID NO: 7357 - DNA, 20 bp, Artificial Sequence
  Synthetic
gttaggcctttcgtgtgggc

SEQ ID NO: 7358 - DNA, 20 bp, Artificial Sequence
  Synthetic
gcggttgtcccggcagattc

SEQ ID NO: 7359 - DNA, 20 bp, Artificial Sequence
  Synthetic
gagagttaagagacctgcat

SEQ ID NO: 7360 - DNA, 20 bp, Artificial Sequence
  Synthetic
ggttctttggaataagagcc

SEQ ID NO: 7361 - DNA, 20 bp, Artificial Sequence
  Synthetic
gccaggtttggactgagaaa

SEQ ID NO: 7362 - DNA, 20 bp, Artificial Sequence
  Synthetic
gctgctgagggaaggaggaa

SEQ ID NO: 7363 - DNA, 20 bp, Artificial Sequence
  Synthetic
ggtgttgatgcttaccttga

SEQ ID NO: 7364 - DNA, 20 bp, Artificial Sequence
  Synthetic
ggttatctgtggtgaatgaa

SEQ ID NO: 7365 - DNA, 20 bp, Artificial Sequence
  Synthetic
gttgttgcttccagcagcag

SEQ ID NO: 7366 - DNA, 20 bp, Artificial Sequence
  Synthetic
gccaacagttcaccaggatg

SEQ ID NO: 7367 - DNA, 20 bp, Artificial Sequence
  Synthetic
gctttcttctggcttctcct

SEQ ID NO: 7368 - DNA, 20 bp, Artificial Sequence
  Synthetic
gtgacgaatgcactgccact

SEQ ID NO: 7369 - DNA, 20 bp, Artificial Sequence
  Synthetic
ggagtgtgttcctataactc

SEQ ID NO: 7370 - DNA, 20 bp, Artificial Sequence
  Synthetic
ggtcattctctccatacagt

SEQ ID NO: 7371 - DNA, 20 bp, Artificial Sequence
  Synthetic
gctccattggaccatctatg

SEQ ID NO: 7372 - DNA, 20 bp, Artificial Sequence
  Synthetic
gggttcagctttctagagac

SEQ ID NO: 7373 - DNA, 20 bp, Artificial Sequence
  Synthetic
gagaaacctgcagttccttc

SEQ ID NO: 7374 - DNA, 20 bp, Artificial Sequence
  Synthetic
ggagctgtccatcaccgaaa

SEQ ID NO: 7375 - DNA, 20 bp, Artificial Sequence
  Synthetic
ggctgggcgctctagctcaa

SEQ ID NO: 7376 - DNA, 20 bp, Artificial Sequence
  Synthetic
gagggtgggagtatccactg

SEQ ID NO: 7377 - DNA, 20 bp, Artificial Sequence
  Synthetic
gattctccacacgcgccaga

SEQ ID NO: 7378 - DNA, 20 bp, Artificial Sequence
  Synthetic
gaatggatgcgggaaggctg

SEQ ID NO: 7379 - DNA, 20 bp, Artificial Sequence
  Synthetic
gaccgatctgacccgccgta

SEQ ID NO: 7380 - DNA, 20 bp, Artificial Sequence
  Synthetic
gcacttcagagggaggctgc

SEQ ID NO: 7381 - DNA, 20 bp, Artificial Sequence
  Synthetic
gatcatacacttgcctgttt

SEQ ID NO: 7382 - DNA, 20 bp, Artificial Sequence
  Synthetic
ggtccatgcacttcagaggg

SEQ ID NO: 7383 - DNA, 20 bp, Artificial Sequence
  Synthetic
gagccctcatagaatggatg

SEQ ID NO: 7384 - DNA, 20 bp, Artificial Sequence
  Synthetic
ggcgggcaaatcaggaggct

SEQ ID NO: 7385 - DNA, 20 bp, Artificial Sequence
  Synthetic
gccatggcagaaccctgatg

SEQ ID NO: 7386 - DNA, 20 bp, Artificial Sequence
  Synthetic
gctgcatcgctttgctcctg

SEQ ID NO: 7387 - DNA, 20 bp, Artificial Sequence
  Synthetic
gcgccttaatttgctggcgg

SEQ ID NO: 7388 - DNA, 20 bp, Artificial Sequence
  Synthetic
gtttgtttcccttctagtct

SEQ ID NO: 7389 - DNA, 20 bp, Artificial Sequence
  Synthetic
gatgaggaatttgctctact

SEQ ID NO: 7390 - DNA, 20 bp, Artificial Sequence
  Synthetic
gcagatagatggttccgtgt

SEQ ID NO: 7391 - DNA, 20 bp, Artificial Sequence
  Synthetic
ggagtcatcgtcgttactta

SEQ ID NO: 7392 - DNA, 20 bp, Artificial Sequence
  Synthetic
ggtttgtttcccttctagtc

SEQ ID NO: 7393 - DNA, 20 bp, Artificial Sequence
  Synthetic
gaagtggcctgaagcaagga

SEQ ID NO: 7394 - DNA, 20 bp, Artificial Sequence
  Synthetic
gctgacaggcttgtgtgttc

SEQ ID NO: 7395 - DNA, 20 bp, Artificial Sequence
  Synthetic
gggaatgactgggacatggt

SEQ ID NO: 7396 - DNA, 20 bp, Artificial Sequence
  Synthetic
gtgccagcagtgtcagtcct

SEQ ID NO: 7397 - DNA, 20 bp, Artificial Sequence
  Synthetic
gaggagcagttcgtggagga

SEQ ID NO: 7398 - DNA, 20 bp, Artificial Sequence
  Synthetic
ggctgttgactgtccctaga

SEQ ID NO: 7399 - DNA, 20 bp, Artificial Sequence
  Synthetic
ggtggtgggttgccagccta

SEQ ID NO: 7400 - DNA, 20 bp, Artificial Sequence
  Synthetic
ggatgaggacatctgtggag

SEQ ID NO: 7401 - DNA, 20 bp, Artificial Sequence
  Synthetic
gccagttgttggcttctgac

SEQ ID NO: 7402 - DNA, 20 bp, Artificial Sequence
  Synthetic
gctgcttgagtgtacttacc

SEQ ID NO: 7403 - DNA, 20 bp, Artificial Sequence
  Synthetic
ggagatgcagcctgagctgc

SEQ ID NO: 7404 - DNA, 20 bp, Artificial Sequence
  Synthetic
gggacattaatgctctggtg

SEQ ID NO: 7405 - DNA, 20 bp, Artificial Sequence
  Synthetic
gccatttaacatcaagttcc

SEQ ID NO: 7406 - DNA, 20 bp, Artificial Sequence
  Synthetic
ggagaatctacaaggttagc

SEQ ID NO: 7407 - DNA, 20 bp, Artificial Sequence
  Synthetic
gtgttctgccagggaggcca

SEQ ID NO: 7408 - DNA, 20 bp, Artificial Sequence
  Synthetic
gaggcgccttcccgtttctc

SEQ ID NO: 7409 - DNA, 20 bp, Artificial Sequence
  Synthetic
gcgagagaatatttctgcta

SEQ ID NO: 7410 - DNA, 20 bp, Artificial Sequence
  Synthetic
gcgagggaggatcaagaaga

SEQ ID NO: 7411 - DNA, 20 bp, Artificial Sequence
  Synthetic
gggaattctagaggcggagg

SEQ ID NO: 7412 - DNA, 20 bp, Artificial Sequence
  Synthetic
gtttatcacccaccaggagg

SEQ ID NO: 7413 - DNA, 20 bp, Artificial Sequence
  Synthetic
gcagttccttctcccaggta

SEQ ID NO: 7414 - DNA, 20 bp, Artificial Sequence
  Synthetic
gccctgagctttccctggtg

SEQ ID NO: 7415 - DNA, 20 bp, Artificial Sequence
  Synthetic
gtctccgctcatcctagggt

SEQ ID NO: 7416 - DNA, 20 bp, Artificial Sequence
  Synthetic
gagggcagccaggatatctg

SEQ ID NO: 7417 - DNA, 20 bp, Artificial Sequence
  Synthetic
gaggaaagggatggtcggaa

SEQ ID NO: 7418 - DNA, 20 bp, Artificial Sequence
  Synthetic
gtaaccgtgaactccgtgcc

SEQ ID NO: 7419 - DNA, 20 bp, Artificial Sequence
  Synthetic
gtgtcattaggaacttcctc

SEQ ID NO: 7420 - DNA, 20 bp, Artificial Sequence
  Synthetic
gacacattgatgaggattgc

SEQ ID NO: 7421 - DNA, 20 bp, Artificial Sequence
  Synthetic
gcttgtgcgaatgtgaggac

SEQ ID NO: 7422 - DNA, 20 bp, Artificial Sequence
  Synthetic
gctaggataagcttcctcca

SEQ ID NO: 7423 - DNA, 20 bp, Artificial Sequence
  Synthetic
gtgtgtgctctcttaagggc

SEQ ID NO: 7424 - DNA, 20 bp, Artificial Sequence
  Synthetic
ggagacctccgtagagcagc

SEQ ID NO: 7425 - DNA, 20 bp, Artificial Sequence
  Synthetic
gggcatactctgaaacacca

SEQ ID NO: 7426 - DNA, 20 bp, Artificial Sequence
  Synthetic
gcgactatctcaccagccgc

SEQ ID NO: 7427 - DNA, 20 bp, Artificial Sequence
  Synthetic
ggatgcaatgggtcccagag

SEQ ID NO: 7428 - DNA, 20 bp, Artificial Sequence
  Synthetic
gaaccaagactggatgcatt

SEQ ID NO: 7429 - DNA, 20 bp, Artificial Sequence
  Synthetic
ggaaggaagtgtttctggct

SEQ ID NO: 7430 - DNA, 20 bp, Artificial Sequence
  Synthetic
gggcctgctgattatttatg

SEQ ID NO: 7431 - DNA, 20 bp, Artificial Sequence
  Synthetic
gagggaaacagaatgtgatt

SEQ ID NO: 7432 - DNA, 20 bp, Artificial Sequence
  Synthetic
ggcaggcctagcttattgcc

SEQ ID NO: 7433 - DNA, 20 bp, Artificial Sequence
  Synthetic
ggacaatgagtctgaagtgg

SEQ ID NO: 7434 - DNA, 20 bp, Artificial Sequence
  Synthetic
gatgtcaaggcagctagtcc

SEQ ID NO: 7435 - DNA, 20 bp, Artificial Sequence
  Synthetic
gggacgcagtttggcgcttc

SEQ ID NO: 7436 - DNA, 20 bp, Artificial Sequence
  Synthetic
gtttatcttgtgggagggcc

SEQ ID NO: 7437 - DNA, 20 bp, Artificial Sequence
  Synthetic
gggaattgtagttcagactg

SEQ ID NO: 7438 - DNA, 20 bp, Artificial Sequence
  Synthetic
gggtcaccttccagaaagtc

SEQ ID NO: 7439 - DNA, 20 bp, Artificial Sequence
  Synthetic
gctgtgatctctggtttgga

SEQ ID NO: 7440 - DNA, 20 bp, Artificial Sequence
  Synthetic
gctaagacagggacgcagtt

SEQ ID NO: 7441 - DNA, 20 bp, Artificial Sequence
  Synthetic
gggagcataaagccactacc

SEQ ID NO: 7442 - DNA, 20 bp, Artificial Sequence
  Synthetic
gctcacatggaatacagaga

SEQ ID NO: 7443 - DNA, 20 bp, Artificial Sequence
  Synthetic
gcaacctgtgctgggatccc

SEQ ID NO: 7444 - DNA, 20 bp, Artificial Sequence
  Synthetic
gcctttacgtgcgactggcg

SEQ ID NO: 7445 - DNA, 20 bp, Artificial Sequence
  Synthetic
gccacaaagcatggctgaat

SEQ ID NO: 7446 - DNA, 20 bp, Artificial Sequence
  Synthetic
ggaaggtgagctgttgaccc

SEQ ID NO: 7447 - DNA, 20 bp, Artificial Sequence
  Synthetic
gacttctgctgtagttatta

SEQ ID NO: 7448 - DNA, 20 bp, Artificial Sequence
  Synthetic
gctcttgcagggaatgtgag

SEQ ID NO: 7449 - DNA, 20 bp, Artificial Sequence
  Synthetic
ggcttccggatcgcttaaga

SEQ ID NO: 7450 - DNA, 20 bp, Artificial Sequence
  Synthetic
gagtagtgttaggcaaggta

SEQ ID NO: 7451 - DNA, 20 bp, Artificial Sequence
  Synthetic
gtcctctccctccaggaacc

SEQ ID NO: 7452 - DNA, 20 bp, Artificial Sequence
  Synthetic
ggatattgtcctctccctcc

SEQ ID NO: 7453 - DNA, 20 bp, Artificial Sequence
  Synthetic
gcgcagtgagcttgaggaga

SEQ ID NO: 7454 - DNA, 20 bp, Artificial Sequence
  Synthetic
ggtgagcaagctgatgagcg

SEQ ID NO: 7455 - DNA, 20 bp, Artificial Sequence
  Synthetic
gtatattgcataacccaaag

SEQ ID NO: 7456 - DNA, 20 bp, Artificial Sequence
  Synthetic
gaggaggtttaggaactgcc

SEQ ID NO: 7457 - DNA, 20 bp, Artificial Sequence
  Synthetic
gggtttggttatccgtaatt

SEQ ID NO: 7458 - DNA, 20 bp, Artificial Sequence
  Synthetic
gagcacagagaagaccagcc

SEQ ID NO: 7459 - DNA, 20 bp, Artificial Sequence
  Synthetic
gagattgtaccacagaaata

SEQ ID NO: 7460 - DNA, 20 bp, Artificial Sequence
  Synthetic
gggatttgttggcaggtcgg

SEQ ID NO: 7461 - DNA, 20 bp, Artificial Sequence
  Synthetic
ggaagttaaggtttacttga

SEQ ID NO: 7462 - DNA, 20 bp, Artificial Sequence
  Synthetic
gggatatgctcactttggga

SEQ ID NO: 7463 - DNA, 20 bp, Artificial Sequence
  Synthetic
ggtcgtcgccttatagccgg

SEQ ID NO: 7464 - DNA, 20 bp, Artificial Sequence
  Synthetic
gaagtgacaggatcagctat

SEQ ID NO: 7465 - DNA, 20 bp, Artificial Sequence
  Synthetic
gtagttattaagtgactgaa

SEQ ID NO: 7466 - DNA, 20 bp, Artificial Sequence
  Synthetic
gctgtccaggagcgcagatc

SEQ ID NO: 7467 - DNA, 20 bp, Artificial Sequence
  Synthetic
gacaggatcagctataggta

SEQ ID NO: 7468 - DNA, 20 bp, Artificial Sequence
  Synthetic
gaagacatcttccagctcca

SEQ ID NO: 7469 - DNA, 20 bp, Artificial Sequence
  Synthetic
gctcagttcaaggccagcag

SEQ ID NO: 7470 - DNA, 20 bp, Artificial Sequence
  Synthetic
ggagaccactcagcaagaga

SEQ ID NO: 7471 - DNA, 20 bp, Artificial Sequence
  Synthetic
gatatgatgtgagggctggc

SEQ ID NO: 7472 - DNA, 20 bp, Artificial Sequence
  Synthetic
ggtgtcatggtaatctttgt

SEQ ID NO: 7473 - DNA, 20 bp, Artificial Sequence
  Synthetic
gtgaagactgagcagaagct

SEQ ID NO: 7474 - DNA, 20 bp, Artificial Sequence
  Synthetic
gcccttcctgtgtgatgctg

SEQ ID NO: 7475 - DNA, 20 bp, Artificial Sequence
  Synthetic
gtgcgtgtataccgccgcgt

SEQ ID NO: 7476 - DNA, 20 bp, Artificial Sequence
  Synthetic
gaggccgcgagaaactcaac

SEQ ID NO: 7477 - DNA, 20 bp, Artificial Sequence
  Synthetic
gacagtgggcgtggtcactt

SEQ ID NO: 7478 - DNA, 20 bp, Artificial Sequence
  Synthetic
ggcgggcagacatagaagga

SEQ ID NO: 7479 - DNA, 20 bp, Artificial Sequence
  Synthetic
gaaggtgagggagagggagc

SEQ ID NO: 7480 - DNA, 20 bp, Artificial Sequence
  Synthetic
gatgaattcccacagaaagg

SEQ ID NO: 7481 - DNA, 20 bp, Artificial Sequence
  Synthetic
gtgaaacgggcatcccggct

SEQ ID NO: 7482 - DNA, 20 bp, Artificial Sequence
  Synthetic
gtttcaactgctttcccaag

SEQ ID NO: 7483 - DNA, 20 bp, Artificial Sequence
  Synthetic
ggtgaatgagtccgaaggcg

SEQ ID NO: 7484 - DNA, 20 bp, Artificial Sequence
  Synthetic
gatcatccctgtgccgatta

SEQ ID NO: 7485 - DNA, 20 bp, Artificial Sequence
  Synthetic
gaggttgtcccggctaactt

SEQ ID NO: 7486 - DNA, 20 bp, Artificial Sequence
  Synthetic
ggcacagcagctttgggagc

SEQ ID NO: 7487 - DNA, 20 bp, Artificial Sequence
  Synthetic
gaagaaggcgctagaaccgg

SEQ ID NO: 7488 - DNA, 20 bp, Artificial Sequence
  Synthetic
ggttgtcccggctaactttg

SEQ ID NO: 7489 - DNA, 20 bp, Artificial Sequence
  Synthetic
gaggtcgagagacccggaat

SEQ ID NO: 7490 - DNA, 20 bp, Artificial Sequence
  Synthetic
gaagcctctcagcgtctcag

SEQ ID NO: 7491 - DNA, 20 bp, Artificial Sequence
  Synthetic
gggcagcctgggagttgaga

SEQ ID NO: 7492 - DNA, 20 bp, Artificial Sequence
  Synthetic
ggcggccaacaatgatcctt

SEQ ID NO: 7493 - DNA, 20 bp, Artificial Sequence
  Synthetic
gatgctttggccgctaactt

SEQ ID NO: 7494 - DNA, 20 bp, Artificial Sequence
  Synthetic
gaggtggtggtggacaccag

SEQ ID NO: 7495 - DNA, 20 bp, Artificial Sequence
  Synthetic
gtggtggtatccagatgggt

SEQ ID NO: 7496 - DNA, 20 bp, Artificial Sequence
  Synthetic
gggtggtcagtgggtgttga

SEQ ID NO: 7497 - DNA, 20 bp, Artificial Sequence
  Synthetic
gggttgataatggcattaga

SEQ ID NO: 7498 - DNA, 20 bp, Artificial Sequence
  Synthetic
gcacaatatagactatgcca

SEQ ID NO: 7499 - DNA, 20 bp, Artificial Sequence
  Synthetic
gggataagcataaacagttg

SEQ ID NO: 7500 - DNA, 20 bp, Artificial Sequence
  Synthetic
ggccatctacagggagggta

SEQ ID NO: 7501 - DNA, 20 bp, Artificial Sequence
  Synthetic
gccataggaaatgggtctta

SEQ ID NO: 7502 - DNA, 20 bp, Artificial Sequence
  Synthetic
gtgttctctgaatgatggct

SEQ ID NO: 7503 - DNA, 20 bp, Artificial Sequence
  Synthetic
ggctcctttctgggaaacta

SEQ ID NO: 7504 - DNA, 20 bp, Artificial Sequence
  Synthetic
gtcttattcgctggtgttaa

SEQ ID NO: 7505 - DNA, 20 bp, Artificial Sequence
  Synthetic
gctggtcaggccataggaaa

SEQ ID NO: 7506 - DNA, 20 bp, Artificial Sequence
  Synthetic
gatgtaggcattgatctttg

SEQ ID NO: 7507 - DNA, 20 bp, Artificial Sequence
  Synthetic
ggatgcagttggtagagtga

SEQ ID NO: 7508 - DNA, 20 bp, Artificial Sequence
  Synthetic
gaagggtaactggcctgtca

SEQ ID NO: 7509 - DNA, 20 bp, Artificial Sequence
  Synthetic
ggacagacatgctggcagtt

SEQ ID NO: 7510 - DNA, 20 bp, Artificial Sequence
  Synthetic
gtgaaaccatagaccaagcc

SEQ ID NO: 7511 - DNA, 20 bp, Artificial Sequence
  Synthetic
gagacccagagaaagttgcc

SEQ ID NO: 7512 - DNA, 20 bp, Artificial Sequence
  Synthetic
gcaaacacccagggtgaccc

SEQ ID NO: 7513 - DNA, 20 bp, Artificial Sequence
  Synthetic
gcttagacttgggatttctt

SEQ ID NO: 7514 - DNA, 20 bp, Artificial Sequence
  Synthetic
gcaagcagggactgagtgag

SEQ ID NO: 7515 - DNA, 20 bp, Artificial Sequence
  Synthetic
gggcagagagttggaaccca

SEQ ID NO: 7516 - DNA, 20 bp, Artificial Sequence
  Synthetic
gccaggctctgcctctaagt

SEQ ID NO: 7517 - DNA, 20 bp, Artificial Sequence
  Synthetic
gtccatctaaggactgggta

SEQ ID NO: 7518 - DNA, 20 bp, Artificial Sequence
  Synthetic
gatgagtccatctaaggact

SEQ ID NO: 7519 - DNA, 20 bp, Artificial Sequence
  Synthetic
gtggatcttcagaaacgcag

SEQ ID NO: 7520 - DNA, 20 bp, Artificial Sequence
  Synthetic
gtcaggttgcccactgattt

SEQ ID NO: 7521 - DNA, 20 bp, Artificial Sequence
  Synthetic
ggtccctaggatggtcgtta

SEQ ID NO: 7522 - DNA, 20 bp, Artificial Sequence
  Synthetic
ggctggaatcaagagggagc

SEQ ID NO: 7523 - DNA, 20 bp, Artificial Sequence
  Synthetic
ggttatggttcccagactgg

SEQ ID NO: 7524 - DNA, 20 bp, Artificial Sequence
  Synthetic
gttacatttgtgtgtgcaag

SEQ ID NO: 7525 - DNA, 20 bp, Artificial Sequence
  Synthetic
gagcaactggataattccca

SEQ ID NO: 7526 - DNA, 20 bp, Artificial Sequence
  Synthetic
gaattatccagttgctccac

SEQ ID NO: 7527 - DNA, 20 bp, Artificial Sequence
  Synthetic
gactggcctgttgtgttgtt

SEQ ID NO: 7528 - DNA, 20 bp, Artificial Sequence
  Synthetic
gctccactcttggaaggctg

SEQ ID NO: 7529 - DNA, 20 bp, Artificial Sequence
  Synthetic
gcggagcgatactcctcacc

SEQ ID NO: 7530 - DNA, 20 bp, Artificial Sequence
  Synthetic
gggatggatggatgatgatg

SEQ ID NO: 7531 - DNA, 20 bp, Artificial Sequence
  Synthetic
gtacaggtaggcagcagaag

SEQ ID NO: 7532 - DNA, 20 bp, Artificial Sequence
  Synthetic
gcttcgtgacgctggtgctg

SEQ ID NO: 7533 - DNA, 20 bp, Artificial Sequence
  Synthetic
gcccaggagaacacatggca

SEQ ID NO: 7534 - DNA, 20 bp, Artificial Sequence
  Synthetic
gtcccacaatttcagtggtt

SEQ ID NO: 7535 - DNA, 20 bp, Artificial Sequence
  Synthetic
gatggtaaactgggcttaga

SEQ ID NO: 7536 - DNA, 20 bp, Artificial Sequence
  Synthetic
gcagcattcctcctcagcag

SEQ ID NO: 7537 - DNA, 20 bp, Artificial Sequence
  Synthetic
gaaacatgcagtttgctgtt

SEQ ID NO: 7538 - DNA, 20 bp, Artificial Sequence
  Synthetic
gatctctaacttcagtagcc

SEQ ID NO: 7539 - DNA, 20 bp, Artificial Sequence
  Synthetic
gttgtgacaggaggtttgaa

SEQ ID NO: 7540 - DNA, 20 bp, Artificial Sequence
  Synthetic
gtcagctctggtcttgtctc

SEQ ID NO: 7541 - DNA, 20 bp, Artificial Sequence
  Synthetic
gtcgttgatccacaattagc

SEQ ID NO: 7542 - DNA, 20 bp, Artificial Sequence
  Synthetic
ggacgaaaggcagatagtgg

SEQ ID NO: 7543 - DNA, 20 bp, Artificial Sequence
  Synthetic
gagttgtggtaatgaagctc

SEQ ID NO: 7544 - DNA, 20 bp, Artificial Sequence
  Synthetic
gcggtttggctcactccaga

SEQ ID NO: 7545 - DNA, 20 bp, Artificial Sequence
  Synthetic
gcagtgtgggcgctgatgaa

SEQ ID NO: 7546 - DNA, 20 bp, Artificial Sequence
  Synthetic
ggacccgaagacaggcgaag

SEQ ID NO: 7547 - DNA, 20 bp, Artificial Sequence
  Synthetic
gttgttgtccacgttgcacc

SEQ ID NO: 7548 - DNA, 20 bp, Artificial Sequence
  Synthetic
gagcggaggcgatctctagt

SEQ ID NO: 7549 - DNA, 20 bp, Artificial Sequence
  Synthetic
gatttggctgagactctgca

SEQ ID NO: 7550 - DNA, 20 bp, Artificial Sequence
  Synthetic
gaggctccgtgagtaggaga

SEQ ID NO: 7551 - DNA, 20 bp, Artificial Sequence
  Synthetic
gagtcctcagcttggctgtt

SEQ ID NO: 7552 - DNA, 20 bp, Artificial Sequence
  Synthetic
gccggagctctagaatgcac

SEQ ID NO: 7553 - DNA, 20 bp, Artificial Sequence
  Synthetic
gttcagatttctttcagaac

SEQ ID NO: 7554 - DNA, 20 bp, Artificial Sequence
  Synthetic
gccagtgctatgtttactat

SEQ ID NO: 7555 - DNA, 20 bp, Artificial Sequence
  Synthetic
gtgcctccctactgactcca

SEQ ID NO: 7556 - DNA, 20 bp, Artificial Sequence
  Synthetic
ggagactttgctctccagaa

SEQ ID NO: 7557 - DNA, 20 bp, Artificial Sequence
  Synthetic
gtgcattctagagctccggc

SEQ ID NO: 7558 - DNA, 20 bp, Artificial Sequence
  Synthetic
gaggtgagtgcattcatgtg

SEQ ID NO: 7559 - DNA, 20 bp, Artificial Sequence
  Synthetic
gatttctgatcgggtttctg

SEQ ID NO: 7560 - DNA, 20 bp, Artificial Sequence
  Synthetic
ggtatcaagaattgtgtaat

SEQ ID NO: 7561 - DNA, 20 bp, Artificial Sequence
  Synthetic
gtctcacatttgggcattta

SEQ ID NO: 7562 - DNA, 20 bp, Artificial Sequence
  Synthetic
gtggtggcaggataggagac

SEQ ID NO: 7563 - DNA, 20 bp, Artificial Sequence
  Synthetic
gggtagcagggacacaggag

SEQ ID NO: 7564 - DNA, 20 bp, Artificial Sequence
  Synthetic
gtgagaaccttgaccatggc

SEQ ID NO: 7565 - DNA, 20 bp, Artificial Sequence
  Synthetic
ggaagtgacactctcaggta

SEQ ID NO: 7566 - DNA, 20 bp, Artificial Sequence
  Synthetic
gagatatgggagtggaagga

SEQ ID NO: 7567 - DNA, 20 bp, Artificial Sequence
  Synthetic
gaagaggattgcgaggtgag

SEQ ID NO: 7568 - DNA, 20 bp, Artificial Sequence
  Synthetic
gctccggtgcagaaagcact

SEQ ID NO: 7569 - DNA, 20 bp, Artificial Sequence
  Synthetic
gcttcaaacagtggaattgg

SEQ ID NO: 7570 - DNA, 20 bp, Artificial Sequence
  Synthetic
gagggtgctggaaagggaca

SEQ ID NO: 7571 - DNA, 20 bp, Artificial Sequence
  Synthetic
gtgggaagatgatataaaga

SEQ ID NO: 7572 - DNA, 20 bp, Artificial Sequence
  Synthetic
gtacttgctgagaatttctt

SEQ ID NO: 7573 - DNA, 20 bp, Artificial Sequence
  Synthetic
ggagcatctgtcttcagtta

SEQ ID NO: 7574 - DNA, 20 bp, Artificial Sequence
  Synthetic
gttagttgctgaacactctt

SEQ ID NO: 7575 - DNA, 20 bp, Artificial Sequence
  Synthetic
gtctgtaagctgcatgtatt

SEQ ID NO: 7576 - DNA, 20 bp, Artificial Sequence
  Synthetic
ggcctgtcactcagagctat

SEQ ID NO: 7577 - DNA, 20 bp, Artificial Sequence
  Synthetic
gcaatcagtcttgcccagtt

SEQ ID NO: 7578 - DNA, 20 bp, Artificial Sequence
  Synthetic
ggacttggtctttaagtagg

SEQ ID NO: 7579 - DNA, 20 bp, Artificial Sequence
  Synthetic
gagggaagcaggcacagaca

SEQ ID NO: 7580 - DNA, 20 bp, Artificial Sequence
  Synthetic
gactgggaaggacacatttg

SEQ ID NO: 7581 - DNA, 20 bp, Artificial Sequence
  Synthetic
ggctagaacgaagccgaggc

SEQ ID NO: 7582 - DNA, 20 bp, Artificial Sequence
  Synthetic
gctgtgaagcctttctcttc

SEQ ID NO: 7583 - DNA, 20 bp, Artificial Sequence
  Synthetic
ggaaccagcagctatgatgg

SEQ ID NO: 7584 - DNA, 20 bp, Artificial Sequence
  Synthetic
gttaggagactccatattaa

SEQ ID NO: 7585 - DNA, 20 bp, Artificial Sequence
  Synthetic
gcgggcagagtaagaggagc

SEQ ID NO: 7586 - DNA, 20 bp, Artificial Sequence
  Synthetic
gactcctactctctgtgcct

SEQ ID NO: 7587 - DNA, 20 bp, Artificial Sequence
  Synthetic
gacaaatggtcattagactt

SEQ ID NO: 7588 - DNA, 20 bp, Artificial Sequence
  Synthetic
gaaagaggcaagacaggacc

SEQ ID NO: 7589 - DNA, 20 bp, Artificial Sequence
  Synthetic
ggcagccacctgggtaaaga

SEQ ID NO: 7590 - DNA, 20 bp, Artificial Sequence
  Synthetic
gcaaggtacctcggatgttt

SEQ ID NO: 7591 - DNA, 20 bp, Artificial Sequence
  Synthetic
gcaagtgggaaggaagggaa

SEQ ID NO: 7592 - DNA, 20 bp, Artificial Sequence
  Synthetic
ggaagagagagcaagtggga

SEQ ID NO: 7593 - DNA, 20 bp, Artificial Sequence
  Synthetic
gacccattcgctgccttcca

SEQ ID NO: 7594 - DNA, 20 bp, Artificial Sequence
  Synthetic
gatttgggtggaaccttgga

SEQ ID NO: 7595 - DNA, 20 bp, Artificial Sequence
  Synthetic
gagagagcaagtgggaagga

SEQ ID NO: 7596 - DNA, 20 bp, Artificial Sequence
  Synthetic
gcgctagaattctggattac

SEQ ID NO: 7597 - DNA, 20 bp, Artificial Sequence
  Synthetic
gtaattaatcctcaggagca

SEQ ID NO: 7598 - DNA, 20 bp, Artificial Sequence
  Synthetic
gagtttaggactggacacac

SEQ ID NO: 7599 - DNA, 20 bp, Artificial Sequence
  Synthetic
gtctcttcttcattggtaga

SEQ ID NO: 7600 - DNA, 20 bp, Artificial Sequence
  Synthetic
gccgtagcggacgtcctgat

SEQ ID NO: 7601 - DNA, 20 bp, Artificial Sequence
  Synthetic
gtcctgattggttggcgctg

SEQ ID NO: 7602 - DNA, 20 bp, Artificial Sequence
  Synthetic
gaagataagggaaggcaaat

SEQ ID NO: 7603 - DNA, 20 bp, Artificial Sequence
  Synthetic
gttagagtcctttcagtgag

SEQ ID NO: 7604 - DNA, 20 bp, Artificial Sequence
  Synthetic
gtgataggctatcgacgcga

SEQ ID NO: 7605 - DNA, 20 bp, Artificial Sequence
  Synthetic
gcagagccagcaaaggaagg

SEQ ID NO: 7606 - DNA, 20 bp, Artificial Sequence
  Synthetic
gggagagctgggaagggaag

SEQ ID NO: 7607 - DNA, 20 bp, Artificial Sequence
  Synthetic
gtcaggtgggcgtggcatta

SEQ ID NO: 7608 - DNA, 20 bp, Artificial Sequence
  Synthetic
gagttgggtgtgatagctac

SEQ ID NO: 7609 - DNA, 20 bp, Artificial Sequence
  Synthetic
gttcctagaggtgaacccac

SEQ ID NO: 7610 - DNA, 20 bp, Artificial Sequence
  Synthetic
gtcagctgtgacctgagtgg

SEQ ID NO: 7611 - DNA, 20 bp, Artificial Sequence
  Synthetic
gtggatgtgtgacaatgcaa

SEQ ID NO: 7612 - DNA, 20 bp, Artificial Sequence
  Synthetic
gtgcctatgcttgcaggccc

SEQ ID NO: 7613 - DNA, 20 bp, Artificial Sequence
  Synthetic
gcaagtgccagctcccagaa

SEQ ID NO: 7614 - DNA, 20 bp, Artificial Sequence
  Synthetic
ggagatgggatgaagtgtcc

SEQ ID NO: 7615 - DNA, 20 bp, Artificial Sequence
  Synthetic
gatgctaaagaagggctgtt

SEQ ID NO: 7616 - DNA, 20 bp, Artificial Sequence
  Synthetic
gcatatctgtgtgcatgcgc

SEQ ID NO: 7617 - DNA, 20 bp, Artificial Sequence
  Synthetic
gtcagtagttgagcagaggt

SEQ ID NO: 7618 - DNA, 20 bp, Artificial Sequence
  Synthetic
gacaagacttgccacctccc

SEQ ID NO: 7619 - DNA, 20 bp, Artificial Sequence
  Synthetic
gtcatgggactgaggcagcc

SEQ ID NO: 7620 - DNA, 20 bp, Artificial Sequence
  Synthetic
gtgcatgcgcagggagtaga

SEQ ID NO: 7621 - DNA, 20 bp, Artificial Sequence
  Synthetic
gctattgacacactcatgcc

SEQ ID NO: 7622 - DNA, 20 bp, Artificial Sequence
  Synthetic
gcttcagcaataagcagctg

SEQ ID NO: 7623 - DNA, 20 bp, Artificial Sequence
  Synthetic
gggagcatttccatttagag

SEQ ID NO: 7624 - DNA, 20 bp, Artificial Sequence
  Synthetic
gcctgggctgtcagtgattc

SEQ ID NO: 7625 - DNA, 20 bp, Artificial Sequence
  Synthetic
gtttcatggatcctttggtt

SEQ ID NO: 7626 - DNA, 20 bp, Artificial Sequence
  Synthetic
gacagacaccttagttatgt

SEQ ID NO: 7627 - DNA, 20 bp, Artificial Sequence
  Synthetic
ggctggcacattaaatgttt

SEQ ID NO: 7628 - DNA, 20 bp, Artificial Sequence
  Synthetic
gcaaacactggtttcacagc

SEQ ID NO: 7629 - DNA, 20 bp, Artificial Sequence
  Synthetic
gctaaactgaaactatgagt

SEQ ID NO: 7630 - DNA, 20 bp, Artificial Sequence
  Synthetic
gagctttgctgtatggaacc

SEQ ID NO: 7631 - DNA, 20 bp, Artificial Sequence
  Synthetic
gaataaattgacttgctcca

SEQ ID NO: 7632 - DNA, 20 bp, Artificial Sequence
  Synthetic
gaagcatggcctatctcagg

SEQ ID NO: 7633 - DNA, 20 bp, Artificial Sequence
  Synthetic
gtttgggttaatgtggagaa

SEQ ID NO: 7634 - DNA, 20 bp, Artificial Sequence
  Synthetic
gccaacaatgatatgataca

SEQ ID NO: 7635 - DNA, 20 bp, Artificial Sequence
  Synthetic
gaactgagagaccggctggg

SEQ ID NO: 7636 - DNA, 20 bp, Artificial Sequence
  Synthetic
gtctcaggatgctgggaagt

SEQ ID NO: 7637 - DNA, 20 bp, Artificial Sequence
  Synthetic
gggaggcagaggtgttattt

SEQ ID NO: 7638 - DNA, 20 bp, Artificial Sequence
  Synthetic
gaggaggcagcggcaaacag

SEQ ID NO: 7639 - DNA, 20 bp, Artificial Sequence
  Synthetic
gaggagggcagagtcatatt

SEQ ID NO: 7640 - DNA, 20 bp, Artificial Sequence
  Synthetic
gctccatggcttaacggagg

SEQ ID NO: 7641 - DNA, 20 bp, Artificial Sequence
  Synthetic
gctgccttgctcaggaggta

SEQ ID NO: 7642 - DNA, 20 bp, Artificial Sequence
  Synthetic
gagtcatcacccgccctgaa

SEQ ID NO: 7643 - DNA, 20 bp, Artificial Sequence
  Synthetic
gcggtagggaacaccggctt

SEQ ID NO: 7644 - DNA, 20 bp, Artificial Sequence
  Synthetic
gtagtgggagtgcgtgagga

SEQ ID NO: 7645 - DNA, 20 bp, Artificial Sequence
  Synthetic
gagcttccagcaggagggac

SEQ ID NO: 7646 - DNA, 20 bp, Artificial Sequence
  Synthetic
gttgtcattgcctgggttgt

SEQ ID NO: 7647 - DNA, 20 bp, Artificial Sequence
  Synthetic
gtcagattccttgggtctcg

SEQ ID NO: 7648 - DNA, 20 bp, Artificial Sequence
  Synthetic
gttgagtcatttgtatgtag

SEQ ID NO: 7649 - DNA, 20 bp, Artificial Sequence
  Synthetic
gtgaaatggagttggaagcc

SEQ ID NO: 7650 - DNA, 20 bp, Artificial Sequence
  Synthetic
gacatgggcaataacagggt

SEQ ID NO: 7651 - DNA, 20 bp, Artificial Sequence
  Synthetic
ggtatgaaatactcaggatg

SEQ ID NO: 7652 - DNA, 20 bp, Artificial Sequence
  Synthetic
gtggaagttgctaagggata

SEQ ID NO: 7653 - DNA, 20 bp, Artificial Sequence
  Synthetic
gatgacactgagtaagtccc

SEQ ID NO: 7654 - DNA, 20 bp, Artificial Sequence
  Synthetic
ggagtcttgattgcagatat

SEQ ID NO: 7655 - DNA, 20 bp, Artificial Sequence
  Synthetic
gaatggagacaaacagctcg

SEQ ID NO: 7656 - DNA, 20 bp, Artificial Sequence
  Synthetic
gtgtaattcctaactgaaag

SEQ ID NO: 7657 - DNA, 20 bp, Artificial Sequence
  Synthetic
gaatttacaatggcagtatg

SEQ ID NO: 7658 - DNA, 20 bp, Artificial Sequence
  Synthetic
gtgctgtggtcatgcatttg

SEQ ID NO: 7659 - DNA, 20 bp, Artificial Sequence
  Synthetic
gtccttgcccactttcagtt

SEQ ID NO: 7660 - DNA, 20 bp, Artificial Sequence
  Synthetic
gccattactgcagcagaact

SEQ ID NO: 7661 - DNA, 20 bp, Artificial Sequence
  Synthetic
gcaataacggcatcaatgag

SEQ ID NO: 7662 - DNA, 20 bp, Artificial Sequence
  Synthetic
gaatgtgttgcaataactgt

SEQ ID NO: 7663 - DNA, 20 bp, Artificial Sequence
  Synthetic
ggcggcagggacagaatgta

SEQ ID NO: 7664 - DNA, 20 bp, Artificial Sequence
  Synthetic
ggcacagtgcaccttggtat

SEQ ID NO: 7665 - DNA, 20 bp, Artificial Sequence
  Synthetic
ggtttcaatgctgggaaccc

SEQ ID NO: 7666 - DNA, 20 bp, Artificial Sequence
  Synthetic
gcagcagcaggccgatacca

SEQ ID NO: 7667 - DNA, 20 bp, Artificial Sequence
  Synthetic
ggccactagaaacctaacga

SEQ ID NO: 7668 - DNA, 20 bp, Artificial Sequence
  Synthetic
gggtagaaagggctgtgggt

SEQ ID NO: 7669 - DNA, 20 bp, Artificial Sequence
  Synthetic
gttggagggagcagctagca

SEQ ID NO: 7670 - DNA, 20 bp, Artificial Sequence
  Synthetic
gatcgaagtggcgcagcagc

SEQ ID NO: 7671 - DNA, 20 bp, Artificial Sequence
  Synthetic
gtgggtgagaaggacagtgg

SEQ ID NO: 7672 - DNA, 20 bp, Artificial Sequence
  Synthetic
gaacaacatttccttgtatg

SEQ ID NO: 7673 - DNA, 20 bp, Artificial Sequence
  Synthetic
gagcagaaggtgtgcactgg

SEQ ID NO: 7674 - DNA, 20 bp, Artificial Sequence
  Synthetic
gagttccggattggattgca

SEQ ID NO: 7675 - DNA, 20 bp, Artificial Sequence
  Synthetic
gctgtgtctctgatggcagt

SEQ ID NO: 7676 - DNA, 20 bp, Artificial Sequence
  Synthetic
gctctttaaacgtctgggct

SEQ ID NO: 7677 - DNA, 20 bp, Artificial Sequence
  Synthetic
gcaccagtgcgggacatgtg

SEQ ID NO: 7678 - DNA, 20 bp, Artificial Sequence
  Synthetic
ggtgcggttcatatcctcaa

SEQ ID NO: 7679 - DNA, 20 bp, Artificial Sequence
  Synthetic
gtgtgggcgctctgagttgg

SEQ ID NO: 7680 - DNA, 20 bp, Artificial Sequence
  Synthetic
gaaggaatccttcaattgca

SEQ ID NO: 7681 - DNA, 20 bp, Artificial Sequence
  Synthetic
gatcaaagggcaggctttag

SEQ ID NO: 7682 - DNA, 20 bp, Artificial Sequence
  Synthetic
gccacctccaaattgcgaca

SEQ ID NO: 7683 - DNA, 20 bp, Artificial Sequence
  Synthetic
gaagactgttcggatgctgt

SEQ ID NO: 7684 - DNA, 20 bp, Artificial Sequence
  Synthetic
gaggcgaacttacaaaggta

SEQ ID NO: 7685 - DNA, 20 bp, Artificial Sequence
  Synthetic
gcctggatcgtatgagatcc

SEQ ID NO: 7686 - DNA, 20 bp, Artificial Sequence
  Synthetic
gcggcattcctaaggtgggt

SEQ ID NO: 7687 - DNA, 20 bp, Artificial Sequence
  Synthetic
gccctctcccagaggagctt

SEQ ID NO: 7688 - DNA, 20 bp, Artificial Sequence
  Synthetic
gccagtgtcctttggccagg

SEQ ID NO: 7689 - DNA, 20 bp, Artificial Sequence
  Synthetic
gacccgcttggcaggatcca

SEQ ID NO: 7690 - DNA, 20 bp, Artificial Sequence
  Synthetic
ggcatctgtcactcccaggc

SEQ ID NO: 7691 - DNA, 20 bp, Artificial Sequence
  Synthetic
ggcacatctccagattcact

SEQ ID NO: 7692 - DNA, 20 bp, Artificial Sequence
  Synthetic
ggagccagagagtgtgtctg

SEQ ID NO: 7693 - DNA, 20 bp, Artificial Sequence
  Synthetic
gtacagcggcagctgcagtg

SEQ ID NO: 7694 - DNA, 20 bp, Artificial Sequence
  Synthetic
gtctgttatcagcccatatt

SEQ ID NO: 7695 - DNA, 20 bp, Artificial Sequence
  Synthetic
gctggaactaagatgtgcaa

SEQ ID NO: 7696 - DNA, 20 bp, Artificial Sequence
  Synthetic
gttgcatgtccgctgggagc

SEQ ID NO: 7697 - DNA, 20 bp, Artificial Sequence
  Synthetic
gatagaatcgtttgctgagt

SEQ ID NO: 7698 - DNA, 20 bp, Artificial Sequence
  Synthetic
gatcctagcatctggcgaga

SEQ ID NO: 7699 - DNA, 20 bp, Artificial Sequence
  Synthetic
gcaaacgtctctgttctcca

SEQ ID NO: 7700 - DNA, 20 bp, Artificial Sequence
  Synthetic
gaagtaggctcttgggattg

SEQ ID NO: 7701 - DNA, 20 bp, Artificial Sequence
  Synthetic
gtgactagaaagagcttcca

SEQ ID NO: 7702 - DNA, 20 bp, Artificial Sequence
  Synthetic
gagttacaacccaagcatgg

SEQ ID NO: 7703 - DNA, 20 bp, Artificial Sequence
  Synthetic
gctgtaaaggtcttaagctg

SEQ ID NO: 7704 - DNA, 20 bp, Artificial Sequence
  Synthetic
gggtgagggaggaacacatg

SEQ ID NO: 7705 - DNA, 20 bp, Artificial Sequence
  Synthetic
gtaatcatttcctaatcacg

SEQ ID NO: 7706 - DNA, 20 bp, Artificial Sequence
  Synthetic
gctccaacaggaaatttggt

SEQ ID NO: 7707 - DNA, 20 bp, Artificial Sequence
  Synthetic
gaccttcggaacttgaggta

SEQ ID NO: 7708 - DNA, 20 bp, Artificial Sequence
  Synthetic
gcaagtgcagaacccttcca

SEQ ID NO: 7709 - DNA, 20 bp, Artificial Sequence
  Synthetic
gggctgtctggttaggaact

SEQ ID NO: 7710 - DNA, 20 bp, Artificial Sequence
  Synthetic
gactctcaggtgggagtcac

SEQ ID NO: 7711 - DNA, 20 bp, Artificial Sequence
  Synthetic
ggaggtggcagattcagaca

SEQ ID NO: 7712 - DNA, 20 bp, Artificial Sequence
  Synthetic
gagcctgagggctattgaaa

SEQ ID NO: 7713 - DNA, 20 bp, Artificial Sequence
  Synthetic
gtttgtgtgttcacaagccc

SEQ ID NO: 7714 - DNA, 20 bp, Artificial Sequence
  Synthetic
gggttctgaccctcttccgt

SEQ ID NO: 7715 - DNA, 20 bp, Artificial Sequence
  Synthetic
gctgtcaatcaaagtaacgt

SEQ ID NO: 7716 - DNA, 20 bp, Artificial Sequence
  Synthetic
gcatctttagaagcaggttt

SEQ ID NO: 7717 - DNA, 20 bp, Artificial Sequence
  Synthetic
gcccaattcaaggcgttctg

SEQ ID NO: 7718 - DNA, 20 bp, Artificial Sequence
  Synthetic
gcctgcacttcgagttaagg

SEQ ID NO: 7719 - DNA, 20 bp, Artificial Sequence
  Synthetic
ggcaccagtcaacttactcc

SEQ ID NO: 7720 - DNA, 20 bp, Artificial Sequence
  Synthetic
gatgactttggtggcactaa

SEQ ID NO: 7721 - DNA, 20 bp, Artificial Sequence
  Synthetic
gcactagggaacagcggcca

SEQ ID NO: 7722 - DNA, 20 bp, Artificial Sequence
  Synthetic
ggtatgcggagtaaatgccc

SEQ ID NO: 7723 - DNA, 20 bp, Artificial Sequence
  Synthetic
gctaaccacgcaatctcagt

SEQ ID NO: 7724 - DNA, 20 bp, Artificial Sequence
  Synthetic
ggtgcttgtcccagggtagc

SEQ ID NO: 7725 - DNA, 20 bp, Artificial Sequence
  Synthetic
gccttacagagtagccctgt

SEQ ID NO: 7726 - DNA, 20 bp, Artificial Sequence
  Synthetic
gaaagaggtaccttgaggaa

SEQ ID NO: 7727 - DNA, 20 bp, Artificial Sequence
  Synthetic
gaagtacagcactggtggga

SEQ ID NO: 7728 - DNA, 20 bp, Artificial Sequence
  Synthetic
gaacctttcccagacctggt

SEQ ID NO: 7729 - DNA, 20 bp, Artificial Sequence
  Synthetic
gacagacggaccaaaggaga

SEQ ID NO: 7730 - DNA, 20 bp, Artificial Sequence
  Synthetic
gtgcttgtcccagggtagct

SEQ ID NO: 7731 - DNA, 20 bp, Artificial Sequence
  Synthetic
gaccagcaggtgtcaggagc

SEQ ID NO: 7732 - DNA, 20 bp, Artificial Sequence
  Synthetic
gtaagcacagccgccctttg

SEQ ID NO: 7733 - DNA, 20 bp, Artificial Sequence
  Synthetic
gccaaagtggagcactggat

SEQ ID NO: 7734 - DNA, 20 bp, Artificial Sequence
  Synthetic
gctagttcaggttgaagatg

SEQ ID NO: 7735 - DNA, 20 bp, Artificial Sequence
  Synthetic
ggtccaggcctgtcatagtg

SEQ ID NO: 7736 - DNA, 20 bp, Artificial Sequence
  Synthetic
gggagtggaggtgcagatag

SEQ ID NO: 7737 - DNA, 20 bp, Artificial Sequence
  Synthetic
gtgttaacccagtggagggt

SEQ ID NO: 7738 - DNA, 20 bp, Artificial Sequence
  Synthetic
gaagtcaggcaactcagggt

SEQ ID NO: 7739 - DNA, 20 bp, Artificial Sequence
  Synthetic
gtcacagggtgggaggtaga

SEQ ID NO: 7740 - DNA, 20 bp, Artificial Sequence
  Synthetic
ggatatttgggcatctggac

SEQ ID NO: 7741 - DNA, 20 bp, Artificial Sequence
  Synthetic
ggtgttaacccagtggaggg

SEQ ID NO: 7742 - DNA, 20 bp, Artificial Sequence
  Synthetic
ggaattgatggtcagactgg

SEQ ID NO: 7743 - DNA, 20 bp, Artificial Sequence
  Synthetic
ggtcacctttctctcggtct

SEQ ID NO: 7744 - DNA, 20 bp, Artificial Sequence
  Synthetic
ggtatgagatgaccaggaca

SEQ ID NO: 7745 - DNA, 20 bp, Artificial Sequence
  Synthetic
gtgtccaggcctggaaccca

SEQ ID NO: 7746 - DNA, 20 bp, Artificial Sequence
  Synthetic
gaacggtcctacgaaatctg

SEQ ID NO: 7747 - DNA, 20 bp, Artificial Sequence
  Synthetic
gacccagagtcatttcttag

SEQ ID NO: 7748 - DNA, 20 bp, Artificial Sequence
  Synthetic
gcagagatgcaacccaagaa

SEQ ID NO: 7749 - DNA, 20 bp, Artificial Sequence
  Synthetic
ggacccgaggtcaactggtg

SEQ ID NO: 7750 - DNA, 20 bp, Artificial Sequence
  Synthetic
ggtttgagaagctgcggttc

SEQ ID NO: 7751 - DNA, 20 bp, Artificial Sequence
  Synthetic
ggagcttagggactgttcca

SEQ ID NO: 7752 - DNA, 20 bp, Artificial Sequence
  Synthetic
gacttaggagagtcgagctg

SEQ ID NO: 7753 - DNA, 20 bp, Artificial Sequence
  Synthetic
gcaggaagcaatcctgcaat

SEQ ID NO: 7754 - DNA, 20 bp, Artificial Sequence
  Synthetic
gacagggctatgacagaaga

SEQ ID NO: 7755 - DNA, 20 bp, Artificial Sequence
  Synthetic
gaaccctcagatcccttcct

SEQ ID NO: 7756 - DNA, 20 bp, Artificial Sequence
  Synthetic
ggcgataagacaggtacaag

SEQ ID NO: 7757 - DNA, 20 bp, Artificial Sequence
  Synthetic
gttccctgagcgagttggct

SEQ ID NO: 7758 - DNA, 20 bp, Artificial Sequence
  Synthetic
gcgttgcaaatctaacgact

SEQ ID NO: 7759 - DNA, 20 bp, Artificial Sequence
  Synthetic
gtgggatgggtcagggacag

SEQ ID NO: 7760 - DNA, 20 bp, Artificial Sequence
  Synthetic
ggctctgactgaaggaagag

SEQ ID NO: 7761 - DNA, 20 bp, Artificial Sequence
  Synthetic
gtctctgaactggagaggat

SEQ ID NO: 7762 - DNA, 20 bp, Artificial Sequence
  Synthetic
ggagctttagagaaagagta

SEQ ID NO: 7763 - DNA, 20 bp, Artificial Sequence
  Synthetic
gctggattaaggtttacaga

SEQ ID NO: 7764 - DNA, 20 bp, Artificial Sequence
  Synthetic
gaactactgcactatgggcc

SEQ ID NO: 7765 - DNA, 20 bp, Artificial Sequence
  Synthetic
gatttacagcttgcctgcat

SEQ ID NO: 7766 - DNA, 20 bp, Artificial Sequence
  Synthetic
ggagtcatttgaagccacac

SEQ ID NO: 7767 - DNA, 20 bp, Artificial Sequence
  Synthetic
gaatttccggtaacaagcac

SEQ ID NO: 7768 - DNA, 20 bp, Artificial Sequence
  Synthetic
ggtgtgtccagtgaggtcaa

SEQ ID NO: 7769 - DNA, 20 bp, Artificial Sequence
  Synthetic
gtaacaggtggcacttccca

SEQ ID NO: 7770 - DNA, 20 bp, Artificial Sequence
  Synthetic
gggcagactcagctggatta

SEQ ID NO: 7771 - DNA, 20 bp, Artificial Sequence
  Synthetic
gccgaggaaggaacaaaggc

SEQ ID NO: 7772 - DNA, 20 bp, Artificial Sequence
  Synthetic
gttcagcgctcacccttcgg

SEQ ID NO: 7773 - DNA, 20 bp, Artificial Sequence
  Synthetic
gaaccaggtgttcacccacg

SEQ ID NO: 7774 - DNA, 20 bp, Artificial Sequence
  Synthetic
ggaagtgagagtccagaggc

SEQ ID NO: 7775 - DNA, 20 bp, Artificial Sequence
  Synthetic
ggtaggaagtgagagtccag

SEQ ID NO: 7776 - DNA, 20 bp, Artificial Sequence
  Synthetic
ggaagctggcaaagcaagca

SEQ ID NO: 7777 - DNA, 20 bp, Artificial Sequence
  Synthetic
gggacaatacagggtgggcg

SEQ ID NO: 7778 - DNA, 20 bp, Artificial Sequence
  Synthetic
gttgcccgcaagcagttcca

SEQ ID NO: 7779 - DNA, 20 bp, Artificial Sequence
  Synthetic
ggttcacaggcaccctatcc

SEQ ID NO: 7780 - DNA, 20 bp, Artificial Sequence
  Synthetic
gatggctatgactatctagc

SEQ ID NO: 7781 - DNA, 20 bp, Artificial Sequence
  Synthetic
ggaggatgcggagagcctat

SEQ ID NO: 7782 - DNA, 20 bp, Artificial Sequence
  Synthetic
ggttggtcatcaccaccgca

SEQ ID NO: 7783 - DNA, 20 bp, Artificial Sequence
  Synthetic
ggctagcttggttgtgtccc

SEQ ID NO: 7784 - DNA, 20 bp, Artificial Sequence
  Synthetic
gaacgcgctgaagtggatga

SEQ ID NO: 7785 - DNA, 20 bp, Artificial Sequence
  Synthetic
gtctgtcaacaggtgacgca

SEQ ID NO: 7786 - DNA, 20 bp, Artificial Sequence
  Synthetic
gtaagtgacactggaatctg

SEQ ID NO: 7787 - DNA, 20 bp, Artificial Sequence
  Synthetic
ggatagcctccctcctgacc

SEQ ID NO: 7788 - DNA, 20 bp, Artificial Sequence
  Synthetic
gcctaacccaggactataca

SEQ ID NO: 7789 - DNA, 20 bp, Artificial Sequence
  Synthetic
gctgaaagggaggcagaagg

SEQ ID NO: 7790 - DNA, 20 bp, Artificial Sequence
  Synthetic
gacactagaagccaagactt

SEQ ID NO: 7791 - DNA, 20 bp, Artificial Sequence
  Synthetic
ggaagtctgtgtctttgcct

SEQ ID NO: 7792 - DNA, 20 bp, Artificial Sequence
  Synthetic
gtcagatttggctggagcgc

SEQ ID NO: 7793 - DNA, 20 bp, Artificial Sequence
  Synthetic
gatgcatgttgcagatttca

SEQ ID NO: 7794 - DNA, 20 bp, Artificial Sequence
  Synthetic
gtctatggctgtggcatgaa

SEQ ID NO: 7795 - DNA, 20 bp, Artificial Sequence
  Synthetic
gaggaccactaccaggtgca

SEQ ID NO: 7796 - DNA, 20 bp, Artificial Sequence
  Synthetic
gaagctgagttcagggcaac

SEQ ID NO: 7797 - DNA, 20 bp, Artificial Sequence
  Synthetic
gatagtacgaccctcttcca

SEQ ID NO: 7798 - DNA, 20 bp, Artificial Sequence
  Synthetic
gatcccatgccagggatccc

SEQ ID NO: 7799 - DNA, 20 bp, Artificial Sequence
  Synthetic
gggcagtggtatccactgta

SEQ ID NO: 7800 - DNA, 20 bp, Artificial Sequence
  Synthetic
gtcttgggagattgagtgga

SEQ ID NO: 7801 - DNA, 20 bp, Artificial Sequence
  Synthetic
gagggagaaggaagctggtt

SEQ ID NO: 7802 - DNA, 20 bp, Artificial Sequence
  Synthetic
gatccctacgctggtctgag

SEQ ID NO: 7803 - DNA, 20 bp, Artificial Sequence
  Synthetic
gaaaccactggaagtggtgg

SEQ ID NO: 7804 - DNA, 20 bp, Artificial Sequence
  Synthetic
gagtcaggtgtgagttctca

SEQ ID NO: 7805 - DNA, 20 bp, Artificial Sequence
  Synthetic
gtgttgtggagagaacgcca

SEQ ID NO: 7806 - DNA, 20 bp, Artificial Sequence
  Synthetic
gtggacttgattcagaggtg

SEQ ID NO: 7807 - DNA, 20 bp, Artificial Sequence
  Synthetic
ggctcacagactctcaggcc

SEQ ID NO: 7808 - DNA, 20 bp, Artificial Sequence
  Synthetic
gcaagctctctggagggaga

SEQ ID NO: 7809 - DNA, 20 bp, Artificial Sequence
  Synthetic
gacacttggctcgtagaagg

SEQ ID NO: 7810 - DNA, 20 bp, Artificial Sequence
  Synthetic
gagcatgcataaactgaatg

SEQ ID NO: 7811 - DNA, 20 bp, Artificial Sequence
  Synthetic
gagtatcatgaagatctctc

SEQ ID NO: 7812 - DNA, 20 bp, Artificial Sequence
  Synthetic
gtctaccacatcctgaactt

SEQ ID NO: 7813 - DNA, 20 bp, Artificial Sequence
  Synthetic
ggctggtgagaagtgttggg

SEQ ID NO: 7814 - DNA, 20 bp, Artificial Sequence
  Synthetic
gttactgtaaccttcaacca

SEQ ID NO: 7815 - DNA, 20 bp, Artificial Sequence
  Synthetic
gcagcaacatttgggaagag

SEQ ID NO: 7816 - DNA, 20 bp, Artificial Sequence
  Synthetic
gtggctccagcagcaacatt

SEQ ID NO: 7817 - DNA, 20 bp, Artificial Sequence
  Synthetic
gaaagtacagtcgggtttac

SEQ ID NO: 7818 - DNA, 20 bp, Artificial Sequence
  Synthetic
gcagaaagcggtgtcttacc

SEQ ID NO: 7819 - DNA, 20 bp, Artificial Sequence
  Synthetic
gagagcccagacgtttctcc

SEQ ID NO: 7820 - DNA, 20 bp, Artificial Sequence
  Synthetic
ggtgtcattggcctgacgtg

SEQ ID NO: 7821 - DNA, 20 bp, Artificial Sequence
  Synthetic
gcggtgtcattggcctgacg

SEQ ID NO: 7822 - DNA, 20 bp, Artificial Sequence
  Synthetic
gtcggaaacctctagtccca

SEQ ID NO: 7823 - DNA, 20 bp, Artificial Sequence
  Synthetic
ggagaactccgagggatccc

SEQ ID NO: 7824 - DNA, 20 bp, Artificial Sequence
  Synthetic
ggcgaatcaactctcagcaa

SEQ ID NO: 7825 - DNA, 20 bp, Artificial Sequence
  Synthetic
ggtgaggagaaatagtaccc

SEQ ID NO: 7826 - DNA, 20 bp, Artificial Sequence
  Synthetic
gcagcccatctcagcttgtc

SEQ ID NO: 7827 - DNA, 20 bp, Artificial Sequence
  Synthetic
gaacctattcccaggtgacc

SEQ ID NO: 7828 - DNA, 20 bp, Artificial Sequence
  Synthetic
gctcagttcagccagaggat

SEQ ID NO: 7829 - DNA, 20 bp, Artificial Sequence
  Synthetic
gtggctccttaaacattctc

SEQ ID NO: 7830 - DNA, 20 bp, Artificial Sequence
  Synthetic
ggcgtctctatagatcctag

SEQ ID NO: 7831 - DNA, 20 bp, Artificial Sequence
  Synthetic
gcctgggctctccacctttg

SEQ ID NO: 7832 - DNA, 20 bp, Artificial Sequence
  Synthetic
ggcagggccaaatctgctcc

SEQ ID NO: 7833 - DNA, 20 bp, Artificial Sequence
  Synthetic
ggagcagatttggccctgcc

SEQ ID NO: 7834 - DNA, 20 bp, Artificial Sequence
  Synthetic
gagcagatttggccctgcca

SEQ ID NO: 7835 - DNA, 20 bp, Artificial Sequence
  Synthetic
ggtatctgtgtgtgtgtgtg

SEQ ID NO: 7836 - DNA, 20 bp, Artificial Sequence
  Synthetic
gttcttctcaaagcttgtta

SEQ ID NO: 7837 - DNA, 20 bp, Artificial Sequence
  Synthetic
gggaaggaaggcagccaaat

SEQ ID NO: 7838 - DNA, 20 bp, Artificial Sequence
  Synthetic
ggacgatccatgccttggga

SEQ ID NO: 7839 - DNA, 20 bp, Artificial Sequence
  Synthetic
ggacccacatccgaatcctt

SEQ ID NO: 7840 - DNA, 20 bp, Artificial Sequence
  Synthetic
gatccatgccttgggaagga

SEQ ID NO: 7841 - DNA, 20 bp, Artificial Sequence
  Synthetic
gcaataatcgagggccggct

SEQ ID NO: 7842 - DNA, 20 bp, Artificial Sequence
  Synthetic
ggccaatgagctcttactta

SEQ ID NO: 7843 - DNA, 20 bp, Artificial Sequence
  Synthetic
gttccaggtcctacttccgt

SEQ ID NO: 7844 - DNA, 20 bp, Artificial Sequence
  Synthetic
ggagcagatgaggactaggc

SEQ ID NO: 7845 - DNA, 20 bp, Artificial Sequence
  Synthetic
gggtttcttccgtgcgtgtt

SEQ ID NO: 7846 - DNA, 20 bp, Artificial Sequence
  Synthetic
gaagggctgcaaccaagtgc

SEQ ID NO: 7847 - DNA, 20 bp, Artificial Sequence
  Synthetic
ggtcatgagtcttaagatgt

SEQ ID NO: 7848 - DNA, 20 bp, Artificial Sequence
  Synthetic
ggtttcttccgtgcgtgttg

SEQ ID NO: 7849 - DNA, 20 bp, Artificial Sequence
  Synthetic
gttactgaagcccagggtaa

SEQ ID NO: 7850 - DNA, 20 bp, Artificial Sequence
  Synthetic
ggagcaatgggagagggagc

SEQ ID NO: 7851 - DNA, 20 bp, Artificial Sequence
  Synthetic
gaaacgcagagcgatggagg

SEQ ID NO: 7852 - DNA, 20 bp, Artificial Sequence
  Synthetic
gcgtttctcttccaatcagc

SEQ ID NO: 7853 - DNA, 20 bp, Artificial Sequence
  Synthetic
gacacacaccagtggcgaca

SEQ ID NO: 7854 - DNA, 20 bp, Artificial Sequence
  Synthetic
gatgatcaggcttccttctg

SEQ ID NO: 7855 - DNA, 20 bp, Artificial Sequence
  Synthetic
gatgccagcccagaggagga

SEQ ID NO: 7856 - DNA, 20 bp, Artificial Sequence
  Synthetic
gatgatgaatctcccattat

SEQ ID NO: 7857 - DNA, 20 bp, Artificial Sequence
  Synthetic
ggcccggacatgagtgttgg

SEQ ID NO: 7858 - DNA, 20 bp, Artificial Sequence
  Synthetic
gcaaacttgtcactgtgccc

SEQ ID NO: 7859 - DNA, 20 bp, Artificial Sequence
  Synthetic
gctccttcagagacagaggg

SEQ ID NO: 7860 - DNA, 20 bp, Artificial Sequence
  Synthetic
gcatccaggacccatatgtg

SEQ ID NO: 7861 - DNA, 20 bp, Artificial Sequence
  Synthetic
gctgtgatcaatccagcccg

SEQ ID NO: 7862 - DNA, 20 bp, Artificial Sequence
  Synthetic
gggttagactccttataggt

SEQ ID NO: 7863 - DNA, 20 bp, Artificial Sequence
  Synthetic
gggccacaagagggacaaca

SEQ ID NO: 7864 - DNA, 20 bp, Artificial Sequence
  Synthetic
ggatcagggcatcactttga

SEQ ID NO: 7865 - DNA, 20 bp, Artificial Sequence
  Synthetic
ggccaccatttagcaatggt

SEQ ID NO: 7866 - DNA, 20 bp, Artificial Sequence
  Synthetic
ggatggaagtacaatttagt

SEQ ID NO: 7867 - DNA, 20 bp, Artificial Sequence
  Synthetic
gctacagccatctgaaccag

SEQ ID NO: 7868 - DNA, 20 bp, Artificial Sequence
  Synthetic
gcaagcccatgtccaaggcc

SEQ ID NO: 7869 - DNA, 20 bp, Artificial Sequence
  Synthetic
ggatccagagcatgtgttcc

SEQ ID NO: 7870 - DNA, 20 bp, Artificial Sequence
  Synthetic
gacctgtattcttgtccctg

SEQ ID NO: 7871 - DNA, 20 bp, Artificial Sequence
  Synthetic
gagggtgatgataggaagga

SEQ ID NO: 7872 - DNA, 20 bp, Artificial Sequence
  Synthetic
gacctgtcggacctgaacta

SEQ ID NO: 7873 - DNA, 20 bp, Artificial Sequence
  Synthetic
ggccaccaactaatagagac

SEQ ID NO: 7874 - DNA, 20 bp, Artificial Sequence
  Synthetic
gtctgtctttggtgacggcc

SEQ ID NO: 7875 - DNA, 20 bp, Artificial Sequence
  Synthetic
ggtcctatactatatggaga

SEQ ID NO: 7876 - DNA, 20 bp, Artificial Sequence
  Synthetic
gagtcccagaacatgggagc

SEQ ID NO: 7877 - DNA, 20 bp, Artificial Sequence
  Synthetic
gggaggacgcatgggaatca

SEQ ID NO: 7878 - DNA, 20 bp, Artificial Sequence
  Synthetic
ggaatcatggcaggcggagg

SEQ ID NO: 7879 - DNA, 20 bp, Artificial Sequence
  Synthetic
gaggcccaatccatacatgg

SEQ ID NO: 7880 - DNA, 20 bp, Artificial Sequence
  Synthetic
gtataggagcccggaggttg

SEQ ID NO: 7881 - DNA, 20 bp, Artificial Sequence
  Synthetic
gccctctccgtccactactt

SEQ ID NO: 7882 - DNA, 20 bp, Artificial Sequence
  Synthetic
gccagcagcataaactggga

SEQ ID NO: 7883 - DNA, 20 bp, Artificial Sequence
  Synthetic
gttgcctaaagtgtccgaac

SEQ ID NO: 7884 - DNA, 20 bp, Artificial Sequence
  Synthetic
gaacctcacctaggatctcc

SEQ ID NO: 7885 - DNA, 20 bp, Artificial Sequence
  Synthetic
gaggaactaggtaggcgagg

SEQ ID NO: 7886 - DNA, 20 bp, Artificial Sequence
  Synthetic
gaaccttacatctcaggtcc

SEQ ID NO: 7887 - DNA, 20 bp, Artificial Sequence
  Synthetic
gtgatgggatctggtggctc

SEQ ID NO: 7888 - DNA, 20 bp, Artificial Sequence
  Synthetic
ggacagatgcattagaggtg

SEQ ID NO: 7889 - DNA, 20 bp, Artificial Sequence
  Synthetic
gggctttggctcactgggaa

SEQ ID NO: 7890 - DNA, 20 bp, Artificial Sequence
  Synthetic
gccaatcagtagaaactggt

SEQ ID NO: 7891 - DNA, 20 bp, Artificial Sequence
  Synthetic
gtaagcgggactgagagtcc

SEQ ID NO: 7892 - DNA, 20 bp, Artificial Sequence
  Synthetic
gggcacaagtgcaaaggccc

SEQ ID NO: 7893 - DNA, 20 bp, Artificial Sequence
  Synthetic
gaattgtcttggtttaccgt

SEQ ID NO: 7894 - DNA, 20 bp, Artificial Sequence
  Synthetic
gcaatactacgtttattcaa

SEQ ID NO: 7895 - DNA, 20 bp, Artificial Sequence
  Synthetic
gcagttagggtaggaaggcc

SEQ ID NO: 7896 - DNA, 20 bp, Artificial Sequence
  Synthetic
gcggcgctaaacggcttcac

SEQ ID NO: 7897 - DNA, 20 bp, Artificial Sequence
  Synthetic
ggcacaagtgcaaaggccct

SEQ ID NO: 7898 - DNA, 20 bp, Artificial Sequence
  Synthetic
ggcctctaggcggcgctaaa

SEQ ID NO: 7899 - DNA, 20 bp, Artificial Sequence
  Synthetic
gacagttacagtcacagaag

SEQ ID NO: 7900 - DNA, 20 bp, Artificial Sequence
  Synthetic
gttagaggaagtcgagggtt

SEQ ID NO: 7901 - DNA, 20 bp, Artificial Sequence
  Synthetic
ggattcctgaggcttcggat

SEQ ID NO: 7902 - DNA, 20 bp, Artificial Sequence
  Synthetic
gttgagtgatgttcactgag

SEQ ID NO: 7903 - DNA, 20 bp, Artificial Sequence
  Synthetic
ggagttgactttatatgatt

SEQ ID NO: 7904 - DNA, 20 bp, Artificial Sequence
  Synthetic
gtcctctgggaaacctgtca

SEQ ID NO: 7905 - DNA, 20 bp, Artificial Sequence
  Synthetic
ggtgtgttaaggagtcgctt

SEQ ID NO: 7906 - DNA, 20 bp, Artificial Sequence
  Synthetic
gctacctgatcgccaggctg

SEQ ID NO: 7907 - DNA, 20 bp, Artificial Sequence
  Synthetic
gaactaagtcagagccgacc

SEQ ID NO: 7908 - DNA, 20 bp, Artificial Sequence
  Synthetic
ggaggtgacagccggactgt

SEQ ID NO: 7909 - DNA, 20 bp, Artificial Sequence
  Synthetic
gctcacatactggctaaagg

SEQ ID NO: 7910 - DNA, 20 bp, Artificial Sequence
  Synthetic
gttgtggttgtccgacaccc

SEQ ID NO: 7911 - DNA, 20 bp, Artificial Sequence
  Synthetic
gcttctgtttagacagtgtc

SEQ ID NO: 7912 - DNA, 20 bp, Artificial Sequence
  Synthetic
gagtgacaacctcagagctg

SEQ ID NO: 7913 - DNA, 20 bp, Artificial Sequence
  Synthetic
gccagtgagtgccacagtca

SEQ ID NO: 7914 - DNA, 20 bp, Artificial Sequence
  Synthetic
gacacccgctaccagatctt

SEQ ID NO: 7915 - DNA, 20 bp, Artificial Sequence
  Synthetic
gtgcctgagtgtgagtgcct

SEQ ID NO: 7916 - DNA, 20 bp, Artificial Sequence
  Synthetic
ggtgtttagagcctggcaat

SEQ ID NO: 7917 - DNA, 20 bp, Artificial Sequence
  Synthetic
gcttgctgcttccctcttgc

SEQ ID NO: 7918 - DNA, 20 bp, Artificial Sequence
  Synthetic
gatggatgaggttggaagag

SEQ ID NO: 7919 - DNA, 20 bp, Artificial Sequence
  Synthetic
gagaaattacaacacaaagg

SEQ ID NO: 7920 - DNA, 20 bp, Artificial Sequence
  Synthetic
gtctcaacagccaacacctt

SEQ ID NO: 7921 - DNA, 20 bp, Artificial Sequence
  Synthetic
gacggtagtggaaacattct

SEQ ID NO: 7922 - DNA, 20 bp, Artificial Sequence
  Synthetic
gaagctacagcaaggcttgc

SEQ ID NO: 7923 - DNA, 20 bp, Artificial Sequence
  Synthetic
gaggcagtgtgaaatgatgg

SEQ ID NO: 7924 - DNA, 20 bp, Artificial Sequence
  Synthetic
ggtgagaaaccctgggctag

SEQ ID NO: 7925 - DNA, 20 bp, Artificial Sequence
  Synthetic
gtcccgggtcaactcaggta

SEQ ID NO: 7926 - DNA, 20 bp, Artificial Sequence
  Synthetic
gttagaaggtgagaaaccct

SEQ ID NO: 7927 - DNA, 20 bp, Artificial Sequence
  Synthetic
gacctcacacatacctgggt

SEQ ID NO: 7928 - DNA, 20 bp, Artificial Sequence
  Synthetic
gtatatgttcctctagccca

SEQ ID NO: 7929 - DNA, 20 bp, Artificial Sequence
  Synthetic
gttgccgggagatggtggaa

SEQ ID NO: 7930 - DNA, 20 bp, Artificial Sequence
  Synthetic
gtggtcttccaatttgagca

SEQ ID NO: 7931 - DNA, 20 bp, Artificial Sequence
  Synthetic
ggacttgtccttcataccca

SEQ ID NO: 7932 - DNA, 20 bp, Artificial Sequence
  Synthetic
gaagggaatcttctaaggca

SEQ ID NO: 7933 - DNA, 20 bp, Artificial Sequence
  Synthetic
ggaagctgacttgtttggga

SEQ ID NO: 7934 - DNA, 20 bp, Artificial Sequence
  Synthetic
gatggcaagagcgctgagtg

SEQ ID NO: 7935 - DNA, 20 bp, Artificial Sequence
  Synthetic
gaatagaaactgaagaggta

SEQ ID NO: 7936 - DNA, 20 bp, Artificial Sequence
  Synthetic
ggaatataatcaaaccaagc

SEQ ID NO: 7937 - DNA, 20 bp, Artificial Sequence
  Synthetic
gttataacacttcaggtgga

SEQ ID NO: 7938 - DNA, 20 bp, Artificial Sequence
  Synthetic
gcacacacaagtcagacttc

SEQ ID NO: 7939 - DNA, 20 bp, Artificial Sequence
  Synthetic
gccttccacagaaccaggct

SEQ ID NO: 7940 - DNA, 20 bp, Artificial Sequence
  Synthetic
gcaagccagtaactttcctt

SEQ ID NO: 7941 - DNA, 20 bp, Artificial Sequence
  Synthetic
gcaagggagatgcgctgtgt

SEQ ID NO: 7942 - DNA, 20 bp, Artificial Sequence
  Synthetic
gtctttatccacccagaggt

SEQ ID NO: 7943 - DNA, 20 bp, Artificial Sequence
  Synthetic
ggctatctgtccgcctgatt

SEQ ID NO: 7944 - DNA, 20 bp, Artificial Sequence
  Synthetic
ggctgccaacacaccagggt

SEQ ID NO: 7945 - DNA, 20 bp, Artificial Sequence
  Synthetic
ggacagctggagagagaaag

SEQ ID NO: 7946 - DNA, 20 bp, Artificial Sequence
  Synthetic
gggacagctggagagagaaa

SEQ ID NO: 7947 - DNA, 20 bp, Artificial Sequence
  Synthetic
gaaccgtccctagatcttac

SEQ ID NO: 7948 - DNA, 20 bp, Artificial Sequence
  Synthetic
gtcgcagctaacctaggcac

SEQ ID NO: 7949 - DNA, 20 bp, Artificial Sequence
  Synthetic
gagctgaacagccaatcacc

SEQ ID NO: 7950 - DNA, 20 bp, Artificial Sequence
  Synthetic
gcttctccagaggcttcaga

SEQ ID NO: 7951 - DNA, 20 bp, Artificial Sequence
  Synthetic
gcaacaaggagctaaactga

SEQ ID NO: 7952 - DNA, 20 bp, Artificial Sequence
  Synthetic
gaacataatgtcccgtgctg

SEQ ID NO: 7953 - DNA, 20 bp, Artificial Sequence
  Synthetic
ggtggtggagtaaggaggac

SEQ ID NO: 7954 - DNA, 20 bp, Artificial Sequence
  Synthetic
ggttagctgcgacagatccc

SEQ ID NO: 7955 - DNA, 20 bp, Artificial Sequence
  Synthetic
gaggctgcttagttaaggga

SEQ ID NO: 7956 - DNA, 20 bp, Artificial Sequence
  Synthetic
gggttaggatcgagccctcg

SEQ ID NO: 7957 - DNA, 20 bp, Artificial Sequence
  Synthetic
gctagtcactttgagcagaa

SEQ ID NO: 7958 - DNA, 20 bp, Artificial Sequence
  Synthetic
gttatcctttctgaggcccg

SEQ ID NO: 7959 - DNA, 20 bp, Artificial Sequence
  Synthetic
gagaactctcctgggttctg

SEQ ID NO: 7960 - DNA, 20 bp, Artificial Sequence
  Synthetic
gcgccttgttgagaagaaac

SEQ ID NO: 7961 - DNA, 20 bp, Artificial Sequence
  Synthetic
gctgtttggaatcttggaac

SEQ ID NO: 7962 - DNA, 20 bp, Artificial Sequence
  Synthetic
gacgccttgctacactgact

SEQ ID NO: 7963 - DNA, 20 bp, Artificial Sequence
  Synthetic
ggctgttaatcaggaagggt

SEQ ID NO: 7964 - DNA, 20 bp, Artificial Sequence
  Synthetic
gagcaattgccggttcctct

SEQ ID NO: 7965 - DNA, 20 bp, Artificial Sequence
  Synthetic
gtttcattaccaaaggaaag

SEQ ID NO: 7966 - DNA, 20 bp, Artificial Sequence
  Synthetic
gcaaataactttctgagcct

SEQ ID NO: 7967 - DNA, 20 bp, Artificial Sequence
  Synthetic
gctggtggcagtcaggcatc

SEQ ID NO: 7968 - DNA, 20 bp, Artificial Sequence
  Synthetic
ggcatgtgccaagcacggag

SEQ ID NO: 7969 - DNA, 20 bp, Artificial Sequence
  Synthetic
gccttggctagcatgtagta

SEQ ID NO: 7970 - DNA, 20 bp, Artificial Sequence
  Synthetic
gtcacgcaggaggctagaac

SEQ ID NO: 7971 - DNA, 20 bp, Artificial Sequence
  Synthetic
ggacaaagcccaagatgcag

SEQ ID NO: 7972 - DNA, 20 bp, Artificial Sequence
  Synthetic
gcatgtgccaagcacggagt

SEQ ID NO: 7973 - DNA, 20 bp, Artificial Sequence
  Synthetic
gtgctagagcattaggttct

SEQ ID NO: 7974 - DNA, 20 bp, Artificial Sequence
  Synthetic
gtattcctttcattagggaa

SEQ ID NO: 7975 - DNA, 20 bp, Artificial Sequence
  Synthetic
ggaggagagccaggctcatt

SEQ ID NO: 7976 - DNA, 20 bp, Artificial Sequence
  Synthetic
ggaataaacgttaactgctg

SEQ ID NO: 7977 - DNA, 20 bp, Artificial Sequence
  Synthetic
ggtggtgacatttcaggcaa

SEQ ID NO: 7978 - DNA, 20 bp, Artificial Sequence
  Synthetic
gcctattggctcacgctccg

SEQ ID NO: 7979 - DNA, 20 bp, Artificial Sequence
  Synthetic
ggctgcagagagagaaggga

SEQ ID NO: 7980 - DNA, 20 bp, Artificial Sequence
  Synthetic
ggcctgagaagctgtgggtc

SEQ ID NO: 7981 - DNA, 20 bp, Artificial Sequence
  Synthetic
ggtgatccagtcaccttgga

SEQ ID NO: 7982 - DNA, 20 bp, Artificial Sequence
  Synthetic
gagagaagggatgggagtgg

SEQ ID NO: 7983 - DNA, 20 bp, Artificial Sequence
  Synthetic
gtgctcacccaaccaagaag

SEQ ID NO: 7984 - DNA, 20 bp, Artificial Sequence
  Synthetic
ggcgaatctcctcacaattc

SEQ ID NO: 7985 - DNA, 20 bp, Artificial Sequence
  Synthetic
ggagttgttagtgttgaggc

SEQ ID NO: 7986 - DNA, 20 bp, Artificial Sequence
  Synthetic
gcctgttggaacgaagggtc

SEQ ID NO: 7987 - DNA, 20 bp, Artificial Sequence
  Synthetic
gcttcatctgttgaatattc

SEQ ID NO: 7988 - DNA, 20 bp, Artificial Sequence
  Synthetic
gcaatttgatgatttgaaca

SEQ ID NO: 7989 - DNA, 20 bp, Artificial Sequence
  Synthetic
gttcatacagtgtctttcaa

SEQ ID NO: 7990 - DNA, 20 bp, Artificial Sequence
  Synthetic
gtgtgctgccacgggctctt

SEQ ID NO: 7991 - DNA, 20 bp, Artificial Sequence
  Synthetic
ggaccctggttgggagtagg

SEQ ID NO: 7992 - DNA, 20 bp, Artificial Sequence
  Synthetic
gccagacccttcgttccaac

SEQ ID NO: 7993 - DNA, 20 bp, Artificial Sequence
  Synthetic
gtatgaatgtgggaaggctg

SEQ ID NO: 7994 - DNA, 20 bp, Artificial Sequence
  Synthetic
ggagttggtatttgtgtgga

SEQ ID NO: 7995 - DNA, 20 bp, Artificial Sequence
  Synthetic
ggcagcagtgatcctaagat

SEQ ID NO: 7996 - DNA, 20 bp, Artificial Sequence
  Synthetic
gacaaataatcctggccaaa

SEQ ID NO: 7997 - DNA, 20 bp, Artificial Sequence
  Synthetic
gacaagctgagggcaagcgc

SEQ ID NO: 7998 - DNA, 20 bp, Artificial Sequence
  Synthetic
ggacaaataatcctggccaa

SEQ ID NO: 7999 - DNA, 20 bp, Artificial Sequence
  Synthetic
gcagtgatcctaagattggt

SEQ ID NO: 8000 - DNA, 20 bp, Artificial Sequence
  Synthetic
ggaagaatgcatatttcact

SEQ ID NO: 8001 - DNA, 20 bp, Artificial Sequence
  Synthetic
ggattgagaagcttcctgga

SEQ ID NO: 8002 - DNA, 20 bp, Artificial Sequence
  Synthetic
gcagcagaggaagtggtgac

SEQ ID NO: 8003 - DNA, 20 bp, Artificial Sequence
  Synthetic
ggttgactcttgctatcagc

SEQ ID NO: 8004 - DNA, 20 bp, Artificial Sequence
  Synthetic
ggatgcctaagtaaacatga

SEQ ID NO: 8005 - DNA, 20 bp, Artificial Sequence
  Synthetic
ggttgctttccctgggtcta

SEQ ID NO: 8006 - DNA, 20 bp, Artificial Sequence
  Synthetic
gagaagtggaggatggtgga

SEQ ID NO: 8007 - DNA, 20 bp, Artificial Sequence
  Synthetic
gtgtgtgctcgtgcaggagg

SEQ ID NO: 8008 - DNA, 20 bp, Artificial Sequence
  Synthetic
gcagtagttaatagggatca

SEQ ID NO: 8009 - DNA, 20 bp, Artificial Sequence
  Synthetic
gccactgaggcattgtttat

SEQ ID NO: 8010 - DNA, 20 bp, Artificial Sequence
  Synthetic
gctggtccttgcttatcatc

SEQ ID NO: 8011 - DNA, 20 bp, Artificial Sequence
  Synthetic
gcgctcttgagtactggagt

SEQ ID NO: 8012 - DNA, 20 bp, Artificial Sequence
  Synthetic
gaactttccatccaggttcc

SEQ ID NO: 8013 - DNA, 20 bp, Artificial Sequence
  Synthetic
ggaatcaagatacgattctg

SEQ ID NO: 8014 - DNA, 20 bp, Artificial Sequence
  Synthetic
gtggtcaggcatcagaggcc

SEQ ID NO: 8015 - DNA, 20 bp, Artificial Sequence
  Synthetic
gggatacaccgcatgcccag

SEQ ID NO: 8016 - DNA, 20 bp, Artificial Sequence
  Synthetic
ggccagccttcatcgctaag

SEQ ID NO: 8017 - DNA, 20 bp, Artificial Sequence
  Synthetic
ggaggagacggtgctttccg

SEQ ID NO: 8018 - DNA, 20 bp, Artificial Sequence
  Synthetic
gctagatgtcaggagaagcc

SEQ ID NO: 8019 - DNA, 20 bp, Artificial Sequence
  Synthetic
gagtaatgcctagatttaag

SEQ ID NO: 8020 - DNA, 20 bp, Artificial Sequence
  Synthetic
gcttacggagcctggagctt

SEQ ID NO: 8021 - DNA, 20 bp, Artificial Sequence
  Synthetic
gagcaggaagacaagctgtg

SEQ ID NO: 8022 - DNA, 20 bp, Artificial Sequence
  Synthetic
gctctgacatcatgttcaga

SEQ ID NO: 8023 - DNA, 20 bp, Artificial Sequence
  Synthetic
gggtgtgtgtgtgaggttca

SEQ ID NO: 8024 - DNA, 20 bp, Artificial Sequence
  Synthetic
gtctgccattatctccgcag

SEQ ID NO: 8025 - DNA, 20 bp, Artificial Sequence
  Synthetic
gtaaactgggtgattaatgt

SEQ ID NO: 8026 - DNA, 20 bp, Artificial Sequence
  Synthetic
gcccgaagacatccactcca

SEQ ID NO: 8027 - DNA, 20 bp, Artificial Sequence
  Synthetic
gcagacggcgactgttgggt

SEQ ID NO: 8028 - DNA, 20 bp, Artificial Sequence
  Synthetic
gttgtgatcaccaggagggt

SEQ ID NO: 8029 - DNA, 20 bp, Artificial Sequence
  Synthetic
gccatatggccacagtcagc

SEQ ID NO: 8030 - DNA, 20 bp, Artificial Sequence
  Synthetic
ggtcgttgaactgctcgatt

SEQ ID NO: 8031 - DNA, 20 bp, Artificial Sequence
  Synthetic
gcacctaagtgtggctcaga

SEQ ID NO: 8032 - DNA, 20 bp, Artificial Sequence
  Synthetic
gggcgactgaagaccaagtg

SEQ ID NO: 8033 - DNA, 20 bp, Artificial Sequence
  Synthetic
gatgcctgctggtcagacct

SEQ ID NO: 8034 - DNA, 20 bp, Artificial Sequence
  Synthetic
gagagggacagagggaggac

SEQ ID NO: 8035 - DNA, 20 bp, Artificial Sequence
  Synthetic
gcctgttcctctatgaggta

SEQ ID NO: 8036 - DNA, 20 bp, Artificial Sequence
  Synthetic
gacaggctgatcagactgcc

SEQ ID NO: 8037 - DNA, 20 bp, Artificial Sequence
  Synthetic
ggcctagatctttccaatca

SEQ ID NO: 8038 - DNA, 20 bp, Artificial Sequence
  Synthetic
gttgcttgtccgagtcttcc

SEQ ID NO: 8039 - DNA, 20 bp, Artificial Sequence
  Synthetic
gagtgacagagacagagaaa

SEQ ID NO: 8040 - DNA, 20 bp, Artificial Sequence
  Synthetic
gcttgagccaattaagatag

SEQ ID NO: 8041 - DNA, 20 bp, Artificial Sequence
  Synthetic
ggtggagaatgacttaggga

SEQ ID NO: 8042 - DNA, 20 bp, Artificial Sequence
  Synthetic
gcaattagggaactggttga

SEQ ID NO: 8043 - DNA, 20 bp, Artificial Sequence
  Synthetic
ggctacaggaacattatgct

SEQ ID NO: 8044 - DNA, 20 bp, Artificial Sequence
  Synthetic
gtcatgtgcaattagggaac

SEQ ID NO: 8045 - DNA, 20 bp, Artificial Sequence
  Synthetic
gccaattaagatagcggagg

SEQ ID NO: 8046 - DNA, 20 bp, Artificial Sequence
  Synthetic
gtcagcaagcacagctgagg

SEQ ID NO: 8047 - DNA, 20 bp, Artificial Sequence
  Synthetic
gggaaattacccgcctgggt

SEQ ID NO: 8048 - DNA, 20 bp, Artificial Sequence
  Synthetic
gatcagacagggtgtgtcgg

SEQ ID NO: 8049 - DNA, 20 bp, Artificial Sequence
  Synthetic
ggaaggcatcctaggtctgg

SEQ ID NO: 8050 - DNA, 20 bp, Artificial Sequence
  Synthetic
gttgtagcgggaaaggcact

SEQ ID NO: 8051 - DNA, 20 bp, Artificial Sequence
  Synthetic
gtgggtgaagcatactagtg

SEQ ID NO: 8052 - DNA, 20 bp, Artificial Sequence
  Synthetic
gaagctagggagaaacctca

SEQ ID NO: 8053 - DNA, 20 bp, Artificial Sequence
  Synthetic
ggagagcattatgagaggtg

SEQ ID NO: 8054 - DNA, 20 bp, Artificial Sequence
  Synthetic
gagggataaaggcaactaca

SEQ ID NO: 8055 - DNA, 20 bp, Artificial Sequence
  Synthetic
gcacccaagctagaatcgga

SEQ ID NO: 8056 - DNA, 20 bp, Artificial Sequence
  Synthetic
gaagagtaatcacagacact

SEQ ID NO: 8057 - DNA, 20 bp, Artificial Sequence
  Synthetic
gcgaccctcctagatcagac

SEQ ID NO: 8058 - DNA, 20 bp, Artificial Sequence
  Synthetic
ggaagccgctttgacgtcgg

SEQ ID NO: 8059 - DNA, 20 bp, Artificial Sequence
  Synthetic
gccactcctaacagtgtcat

SEQ ID NO: 8060 - DNA, 20 bp, Artificial Sequence
  Synthetic
gcagtcacggaaagagccga

SEQ ID NO: 8061 - DNA, 20 bp, Artificial Sequence
  Synthetic
gtcacggaaagagccgaagg

SEQ ID NO: 8062 - DNA, 20 bp, Artificial Sequence
  Synthetic
gctttgacgtcggcggaaac

SEQ ID NO: 8063 - DNA, 20 bp, Artificial Sequence
  Synthetic
gcctgtggaggcggtgacat

SEQ ID NO: 8064 - DNA, 20 bp, Artificial Sequence
  Synthetic
gatctaggtatagtggtgta

SEQ ID NO: 8065 - DNA, 20 bp, Artificial Sequence
  Synthetic
gttgttctctgttgtgagtg

SEQ ID NO: 8066 - DNA, 20 bp, Artificial Sequence
  Synthetic
gtctccgctttgatgtttat

SEQ ID NO: 8067 - DNA, 20 bp, Artificial Sequence
  Synthetic
gattggccattggaggcctg

SEQ ID NO: 8068 - DNA, 20 bp, Artificial Sequence
  Synthetic
gtgattggtcagagcgctca

SEQ ID NO: 8069 - DNA, 20 bp, Artificial Sequence
  Synthetic
gttctagttctgagttaacc

SEQ ID NO: 8070 - DNA, 20 bp, Artificial Sequence
  Synthetic
gagttgttgaagctggtgaa

SEQ ID NO: 8071 - DNA, 20 bp, Artificial Sequence
  Synthetic
gttaatctggaaaggaaact

SEQ ID NO: 8072 - DNA, 20 bp, Artificial Sequence
  Synthetic
gagagaatgtcaggagctaa

SEQ ID NO: 8073 - DNA, 20 bp, Artificial Sequence
  Synthetic
gtaatttaaggcgcagatgg

SEQ ID NO: 8074 - DNA, 20 bp, Artificial Sequence
  Synthetic
ggtaatttaaggcgcagatg

SEQ ID NO: 8075 - DNA, 20 bp, Artificial Sequence
  Synthetic
gagtaaactgaggtttatgt

SEQ ID NO: 8076 - DNA, 20 bp, Artificial Sequence
  Synthetic
gactcctcttcggctctggc

SEQ ID NO: 8077 - DNA, 20 bp, Artificial Sequence
  Synthetic
gtcgtgggagaggtctggag

SEQ ID NO: 8078 - DNA, 20 bp, Artificial Sequence
  Synthetic
gatgctcgcgactcccttcc

SEQ ID NO: 8079 - DNA, 20 bp, Artificial Sequence
  Synthetic
gggagtcgcgagcatcatac

SEQ ID NO: 8080 - DNA, 20 bp, Artificial Sequence
  Synthetic
gcgaaagaactacagagccc

SEQ ID NO: 8081 - DNA, 20 bp, Artificial Sequence
  Synthetic
ggagaggtctggagagggag

SEQ ID NO: 8082 - DNA, 20 bp, Artificial Sequence
  Synthetic
ggtttgtccgagggcaagag

SEQ ID NO: 8083 - DNA, 20 bp, Artificial Sequence
  Synthetic
gacaagagctggctgaggag

SEQ ID NO: 8084 - DNA, 20 bp, Artificial Sequence
  Synthetic
gtgtatatgggattgatatg

SEQ ID NO: 8085 - DNA, 20 bp, Artificial Sequence
  Synthetic
gtgaagtcaaggtaagggca

SEQ ID NO: 8086 - DNA, 20 bp, Artificial Sequence
  Synthetic
ggcttaaggacagggtcttg

SEQ ID NO: 8087 - DNA, 20 bp, Artificial Sequence
  Synthetic
gtggcattggcaggactgga

SEQ ID NO: 8088 - DNA, 20 bp, Artificial Sequence
  Synthetic
gtccttattgggcggaggga

SEQ ID NO: 8089 - DNA, 20 bp, Artificial Sequence
  Synthetic
ggaaagttctgagatgaact

SEQ ID NO: 8090 - DNA, 20 bp, Artificial Sequence
  Synthetic
gcagactgctcaggtggagg

SEQ ID NO: 8091 - DNA, 20 bp, Artificial Sequence
  Synthetic
gaccctgacagtagaaggaa

SEQ ID NO: 8092 - DNA, 20 bp, Artificial Sequence
  Synthetic
gggcagagaccttaggaggt

SEQ ID NO: 8093 - DNA, 20 bp, Artificial Sequence
  Synthetic
gggaccggaatttctttctg

SEQ ID NO: 8094 - DNA, 20 bp, Artificial Sequence
  Synthetic
ggcataagagctggaatcag

SEQ ID NO: 8095 - DNA, 20 bp, Artificial Sequence
  Synthetic
gtcacgtgtcacggaggcac

SEQ ID NO: 8096 - DNA, 20 bp, Artificial Sequence
  Synthetic
gtggcataagagctggaatc

SEQ ID NO: 8097 - DNA, 20 bp, Artificial Sequence
  Synthetic
ggaatttctttctgtggacc

SEQ ID NO: 8098 - DNA, 20 bp, Artificial Sequence
  Synthetic
gcattatcccttagatgcca

SEQ ID NO: 8099 - DNA, 20 bp, Artificial Sequence
  Synthetic
gggtatgttccttgtccata

SEQ ID NO: 8100 - DNA, 20 bp, Artificial Sequence
  Synthetic
ggatggaattgaggcataca

SEQ ID NO: 8101 - DNA, 20 bp, Artificial Sequence
  Synthetic
ggtcatagggtcacgtgtca

SEQ ID NO: 8102 - DNA, 20 bp, Artificial Sequence
  Synthetic
gaaggaactaagtttcttct

SEQ ID NO: 8103 - DNA, 20 bp, Artificial Sequence
  Synthetic
gtgacaggtgatctaggcgc

SEQ ID NO: 8104 - DNA, 20 bp, Artificial Sequence
  Synthetic
gctcaggtgtggtggagtag

SEQ ID NO: 8105 - DNA, 20 bp, Artificial Sequence
  Synthetic
ggaaccttgttgctagggcc

SEQ ID NO: 8106 - DNA, 20 bp, Artificial Sequence
  Synthetic
gccaggtactcaagatgcca

SEQ ID NO: 8107 - DNA, 20 bp, Artificial Sequence
  Synthetic
gagtctgccatacccaagga

SEQ ID NO: 8108 - DNA, 20 bp, Artificial Sequence
  Synthetic
gagcagttgtcgcactggga

SEQ ID NO: 8109 - DNA, 20 bp, Artificial Sequence
  Synthetic
ggagtagcggagaatagtgc

SEQ ID NO: 8110 - DNA, 20 bp, Artificial Sequence
  Synthetic
ggagagcttacggtctagaa

SEQ ID NO: 8111 - DNA, 20 bp, Artificial Sequence
  Synthetic
gtaagactggcttacaagtc

SEQ ID NO: 8112 - DNA, 20 bp, Artificial Sequence
  Synthetic
gagatcagttctaacctgct

SEQ ID NO: 8113 - DNA, 20 bp, Artificial Sequence
  Synthetic
gtatgagggaatgcacacgg

SEQ ID NO: 8114 - DNA, 20 bp, Artificial Sequence
  Synthetic
gtgcacaccattcacagaac

SEQ ID NO: 8115 - DNA, 20 bp, Artificial Sequence
  Synthetic
gtaatccaatcaggttacat

SEQ ID NO: 8116 - DNA, 20 bp, Artificial Sequence
  Synthetic
ggcggcagagaaagggttaa

SEQ ID NO: 8117 - DNA, 20 bp, Artificial Sequence
  Synthetic
gtactatgctggccaatctc

SEQ ID NO: 8118 - DNA, 20 bp, Artificial Sequence
  Synthetic
gggtgacactaaactgtgtg

SEQ ID NO: 8119 - DNA, 20 bp, Artificial Sequence
  Synthetic
gtggtacagggaagatcgcg

SEQ ID NO: 8120 - DNA, 20 bp, Artificial Sequence
  Synthetic
gtctcattgtgcctttgcac

SEQ ID NO: 8121 - DNA, 20 bp, Artificial Sequence
  Synthetic
gcaggcacccaggtagctac

SEQ ID NO: 8122 - DNA, 20 bp, Artificial Sequence
  Synthetic
ggcagcctgaagcaggtcta

SEQ ID NO: 8123 - DNA, 20 bp, Artificial Sequence
  Synthetic
ggtaacagactgcgcccaac

SEQ ID NO: 8124 - DNA, 20 bp, Artificial Sequence
  Synthetic
gagactgatggatcagggtt

SEQ ID NO: 8125 - DNA, 20 bp, Artificial Sequence
  Synthetic
gcctgcaccaacccaggaac

SEQ ID NO: 8126 - DNA, 20 bp, Artificial Sequence
  Synthetic
gaaatgctctgtggctccta

SEQ ID NO: 8127 - DNA, 20 bp, Artificial Sequence
  Synthetic
gctggcatgctgacatcctc

SEQ ID NO: 8128 - DNA, 20 bp, Artificial Sequence
  Synthetic
gtggatttcggagaaattga

SEQ ID NO: 8129 - DNA, 20 bp, Artificial Sequence
  Synthetic
gggcacttctaggtctccca

SEQ ID NO: 8130 - DNA, 20 bp, Artificial Sequence
  Synthetic
ggactttagccaatgtggac

SEQ ID NO: 8131 - DNA, 20 bp, Artificial Sequence
  Synthetic
ggagaaagcattcaagtgtg

SEQ ID NO: 8132 - DNA, 20 bp, Artificial Sequence
  Synthetic
gtccacagtctttgcgctca

SEQ ID NO: 8133 - DNA, 20 bp, Artificial Sequence
  Synthetic
gcctgtgagtgcagtgagtg

SEQ ID NO: 8134 - DNA, 20 bp, Artificial Sequence
  Synthetic
gtattgtgaaactcatttgg

SEQ ID NO: 8135 - DNA, 20 bp, Artificial Sequence
  Synthetic
gtcgtacacctcggtgccca

SEQ ID NO: 8136 - DNA, 20 bp, Artificial Sequence
  Synthetic
gttcagtaaggtttctgtgt

SEQ ID NO: 8137 - DNA, 20 bp, Artificial Sequence
  Synthetic
gaaatgataaacccagagga

SEQ ID NO: 8138 - DNA, 20 bp, Artificial Sequence
  Synthetic
gaaggcagcgccctttactc

SEQ ID NO: 8139 - DNA, 20 bp, Artificial Sequence
  Synthetic
gcgttgcatattgaggttag

SEQ ID NO: 8140 - DNA, 20 bp, Artificial Sequence
  Synthetic
gagctgggaaagccactgag

SEQ ID NO: 8141 - DNA, 20 bp, Artificial Sequence
  Synthetic
gagggcgctcctaagaaacc

SEQ ID NO: 8142 - DNA, 20 bp, Artificial Sequence
  Synthetic
gccagaatcaaagccacgct

SEQ ID NO: 8143 - DNA, 20 bp, Artificial Sequence
  Synthetic
gactcaagaattacagtttc

SEQ ID NO: 8144 - DNA, 20 bp, Artificial Sequence
  Synthetic
gcaaaccgcgatgcaggatg

SEQ ID NO: 8145 - DNA, 20 bp, Artificial Sequence
  Synthetic
gacttcgttggcccaaacca

SEQ ID NO: 8146 - DNA, 20 bp, Artificial Sequence
  Synthetic
ggtgcccacatcctgcatcg

SEQ ID NO: 8147 - DNA, 20 bp, Artificial Sequence
  Synthetic
ggaagaaatttaagatggaa

SEQ ID NO: 8148 - DNA, 20 bp, Artificial Sequence
  Synthetic
ggactagttgggaaggatgg

SEQ ID NO: 8149 - DNA, 20 bp, Artificial Sequence
  Synthetic
gcacatgaatgagggtcgct

SEQ ID NO: 8150 - DNA, 20 bp, Artificial Sequence
  Synthetic
gggcatagtggacaccaaag

SEQ ID NO: 8151 - DNA, 20 bp, Artificial Sequence
  Synthetic
gtaccttggttccctatcct

SEQ ID NO: 8152 - DNA, 20 bp, Artificial Sequence
  Synthetic
gcaactggaagccctgtcga

SEQ ID NO: 8153 - DNA, 20 bp, Artificial Sequence
  Synthetic
gaaggactagttgggaagga

SEQ ID NO: 8154 - DNA, 20 bp, Artificial Sequence
  Synthetic
gaagccctgtcgagggctca

SEQ ID NO: 8155 - DNA, 20 bp, Artificial Sequence
  Synthetic
gttccgaaccaaatgtcgga

SEQ ID NO: 8156 - DNA, 20 bp, Artificial Sequence
  Synthetic
ggctgttaggcctctgccat

SEQ ID NO: 8157 - DNA, 20 bp, Artificial Sequence
  Synthetic
gccattgccttcctccttcc

SEQ ID NO: 8158 - DNA, 20 bp, Artificial Sequence
  Synthetic
gaaagtgataccatacatat

SEQ ID NO: 8159 - DNA, 20 bp, Artificial Sequence
  Synthetic
ggccaaccacaacctcaaac

SEQ ID NO: 8160 - DNA, 20 bp, Artificial Sequence
  Synthetic
gccaaccacaacctcaaact

SEQ ID NO: 8161 - DNA, 20 bp, Artificial Sequence
  Synthetic
gggctttcacaacgttcctg

SEQ ID NO: 8162 - DNA, 20 bp, Artificial Sequence
  Synthetic
gctaagtttcacttaccaac

SEQ ID NO: 8163 - DNA, 20 bp, Artificial Sequence
  Synthetic
gagctcacttccggcgacga

SEQ ID NO: 8164 - DNA, 20 bp, Artificial Sequence
  Synthetic
ggaccatgtgggctacagat

SEQ ID NO: 8165 - DNA, 20 bp, Artificial Sequence
  Synthetic
gcagaaactagtaacagaat

SEQ ID NO: 8166 - DNA, 20 bp, Artificial Sequence
  Synthetic
gctacttccgagctcacttc

SEQ ID NO: 8167 - DNA, 20 bp, Artificial Sequence
  Synthetic
gtgattggtggccctgctga

SEQ ID NO: 8168 - DNA, 20 bp, Artificial Sequence
  Synthetic
gttgttccttattcagttgg

SEQ ID NO: 8169 - DNA, 20 bp, Artificial Sequence
  Synthetic
ggctagccaggcggaaactg

SEQ ID NO: 8170 - DNA, 20 bp, Artificial Sequence
  Synthetic
gcgtgaatgagagaaatgac

SEQ ID NO: 8171 - DNA, 20 bp, Artificial Sequence
  Synthetic
gcccaagcatgaagggcagt

SEQ ID NO: 8172 - DNA, 20 bp, Artificial Sequence
  Synthetic
gttacgagtttaaagctttc

SEQ ID NO: 8173 - DNA, 20 bp, Artificial Sequence
  Synthetic
gctcaaggtacgacttctaa

SEQ ID NO: 8174 - DNA, 20 bp, Artificial Sequence
  Synthetic
gacagtggctgagggtttct

SEQ ID NO: 8175 - DNA, 20 bp, Artificial Sequence
  Synthetic
ggtcctgtgaactaaatcta

SEQ ID NO: 8176 - DNA, 20 bp, Artificial Sequence
  Synthetic
gactcccagctttagcatag

SEQ ID NO: 8177 - DNA, 20 bp, Artificial Sequence
  Synthetic
gaagcagtgcccagaccact

SEQ ID NO: 8178 - DNA, 20 bp, Artificial Sequence
  Synthetic
gctaacctgccaagtggtct

SEQ ID NO: 8179 - DNA, 20 bp, Artificial Sequence
  Synthetic
ggtcacgaagagctaataac

SEQ ID NO: 8180 - DNA, 20 bp, Artificial Sequence
  Synthetic
gccaggtctcatcacggtct

SEQ ID NO: 8181 - DNA, 20 bp, Artificial Sequence
  Synthetic
gactccgagagaagggtgca

SEQ ID NO: 8182 - DNA, 20 bp, Artificial Sequence
  Synthetic
ggtaaatgaagaagctcagg

SEQ ID NO: 8183 - DNA, 20 bp, Artificial Sequence
  Synthetic
gctggtaaatgaagaagctc

SEQ ID NO: 8184 - DNA, 20 bp, Artificial Sequence
  Synthetic
gcagggaagaagggaaaggg

SEQ ID NO: 8185 - DNA, 20 bp, Artificial Sequence
  Synthetic
ggatagaagacggtttaagc

SEQ ID NO: 8186 - DNA, 20 bp, Artificial Sequence
  Synthetic
gggctactctctaaaggatg

SEQ ID NO: 8187 - DNA, 20 bp, Artificial Sequence
  Synthetic
gagccaaggcacaaggtgtg

SEQ ID NO: 8188 - DNA, 20 bp, Artificial Sequence
  Synthetic
gcttcctggaagccgtgacg

SEQ ID NO: 8189 - DNA, 20 bp, Artificial Sequence
  Synthetic
ggtctaagacttaaagatct

SEQ ID NO: 8190 - DNA, 20 bp, Artificial Sequence
  Synthetic
ggttgtgtacgaccaactgg

SEQ ID NO: 8191 - DNA, 20 bp, Artificial Sequence
  Synthetic
gtgcgttgcgtatcgaggta

SEQ ID NO: 8192 - DNA, 20 bp, Artificial Sequence
  Synthetic
ggcagtcgggaagagaactg

SEQ ID NO: 8193 - DNA, 20 bp, Artificial Sequence
  Synthetic
gactcagcagatagaggagg

SEQ ID NO: 8194 - DNA, 20 bp, Artificial Sequence
  Synthetic
gaaggaaggagccgagggag

SEQ ID NO: 8195 - DNA, 20 bp, Artificial Sequence
  Synthetic
gcggcagcaggaaaggaaag

SEQ ID NO: 8196 - DNA, 20 bp, Artificial Sequence
  Synthetic
gtgggaggatggaagctaga

SEQ ID NO: 8197 - DNA, 20 bp, Artificial Sequence
  Synthetic
gctaccttcactaatctgct

SEQ ID NO: 8198 - DNA, 20 bp, Artificial Sequence
  Synthetic
ggcttccggaagagacctct

SEQ ID NO: 8199 - DNA, 20 bp, Artificial Sequence
  Synthetic
gctgccttcacgtccggttt

SEQ ID NO: 8200 - DNA, 20 bp, Artificial Sequence
  Synthetic
gagagccgctcgagcacatc

SEQ ID NO: 8201 - DNA, 20 bp, Artificial Sequence
  Synthetic
gtcacagtcttaagagaggt

SEQ ID NO: 8202 - DNA, 20 bp, Artificial Sequence
  Synthetic
gtgaaggcagcgtgtgttaa

SEQ ID NO: 8203 - DNA, 20 bp, Artificial Sequence
  Synthetic
gaacactgatcagtactcta

SEQ ID NO: 8204 - DNA, 20 bp, Artificial Sequence
  Synthetic
gttgtgggaaggtaccattg

SEQ ID NO: 8205 - DNA, 20 bp, Artificial Sequence
  Synthetic
gagaagataaatgagtggtt

SEQ ID NO: 8206 - DNA, 20 bp, Artificial Sequence
  Synthetic
ggtagctttctccggagctg

SEQ ID NO: 8207 - DNA, 20 bp, Artificial Sequence
  Synthetic
ggtccgcgaaatctgaaacc

SEQ ID NO: 8208 - DNA, 20 bp, Artificial Sequence
  Synthetic
gcataagtacataggatttc

SEQ ID NO: 8209 - DNA, 20 bp, Artificial Sequence
  Synthetic
gaaatgttcatggcccaaag

SEQ ID NO: 8210 - DNA, 20 bp, Artificial Sequence
  Synthetic
gtggcaaggagatgtttact

SEQ ID NO: 8211 - DNA, 20 bp, Artificial Sequence
  Synthetic
gcattccagtccatgatgac

SEQ ID NO: 8212 - DNA, 20 bp, Artificial Sequence
  Synthetic
gtttcctttcacctacaatt

SEQ ID NO: 8213 - DNA, 20 bp, Artificial Sequence
  Synthetic
ggagtaactaactccgagct

SEQ ID NO: 8214 - DNA, 20 bp, Artificial Sequence
  Synthetic
gagtctcaaggccaggcgat

SEQ ID NO: 8215 - DNA, 20 bp, Artificial Sequence
  Synthetic
gcattccagcctacccagct

SEQ ID NO: 8216 - DNA, 20 bp, Artificial Sequence
  Synthetic
gcctggacaaggattcacgt

SEQ ID NO: 8217 - DNA, 20 bp, Artificial Sequence
  Synthetic
gtacaatcttgtcctaggta

SEQ ID NO: 8218 - DNA, 20 bp, Artificial Sequence
  Synthetic
ggaatgagacctaccaaagg

SEQ ID NO: 8219 - DNA, 20 bp, Artificial Sequence
  Synthetic
gtgaatccttgtccaggccc

SEQ ID NO: 8220 - DNA, 20 bp, Artificial Sequence
  Synthetic
gtagccttcagcaaatttcg

SEQ ID NO: 8221 - DNA, 20 bp, Artificial Sequence
  Synthetic
gaatccttgtccaggccctg

SEQ ID NO: 8222 - DNA, 20 bp, Artificial Sequence
  Synthetic
gctggacatctctaggccgt

SEQ ID NO: 8223 - DNA, 20 bp, Artificial Sequence
  Synthetic
gggagggaaatggtcaggga

SEQ ID NO: 8224 - DNA, 20 bp, Artificial Sequence
  Synthetic
ggctcggatcagacggagag

SEQ ID NO: 8225 - DNA, 20 bp, Artificial Sequence
  Synthetic
gcttgggctctgacagcact

SEQ ID NO: 8226 - DNA, 20 bp, Artificial Sequence
  Synthetic
gcctagggatgactgatccc

SEQ ID NO: 8227 - DNA, 20 bp, Artificial Sequence
  Synthetic
gtccatggaggcagctagcg

SEQ ID NO: 8228 - DNA, 20 bp, Artificial Sequence
  Synthetic
ggaagggagggaaatggtca

SEQ ID NO: 8229 - DNA, 20 bp, Artificial Sequence
  Synthetic
gctgccctctttccaccctc

SEQ ID NO: 8230 - DNA, 20 bp, Artificial Sequence
  Synthetic
gctgcctctcctaggtggag

SEQ ID NO: 8231 - DNA, 20 bp, Artificial Sequence
  Synthetic
ggcctcaaagggcagtttag

SEQ ID NO: 8232 - DNA, 20 bp, Artificial Sequence
  Synthetic
gttcgccagatgcagaatcc

SEQ ID NO: 8233 - DNA, 20 bp, Artificial Sequence
  Synthetic
gtcatgacgcacgaaggcgg

SEQ ID NO: 8234 - DNA, 20 bp, Artificial Sequence
  Synthetic
ggccttgaaggctgatgttt

SEQ ID NO: 8235 - DNA, 20 bp, Artificial Sequence
  Synthetic
gactctaaagacacggtgtg

SEQ ID NO: 8236 - DNA, 20 bp, Artificial Sequence
  Synthetic
ggcggatcctctctgggttc

SEQ ID NO: 8237 - DNA, 20 bp, Artificial Sequence
  Synthetic
gtcaaatctaatagtcttgt

SEQ ID NO: 8238 - DNA, 20 bp, Artificial Sequence
  Synthetic
gtaggacggccaataaacat

SEQ ID NO: 8239 - DNA, 20 bp, Artificial Sequence
  Synthetic
ggaatgacctccagccaggt

SEQ ID NO: 8240 - DNA, 20 bp, Artificial Sequence
  Synthetic
ggtttagtgcgcggcatgct

SEQ ID NO: 8241 - DNA, 20 bp, Artificial Sequence
  Synthetic
gcagggagggtagtaagact

SEQ ID NO: 8242 - DNA, 20 bp, Artificial Sequence
  Synthetic
gaattcaataatctctgacc

SEQ ID NO: 8243 - DNA, 20 bp, Artificial Sequence
  Synthetic
gtttggctaggtcaagactg

SEQ ID NO: 8244 - DNA, 20 bp, Artificial Sequence
  Synthetic
gagggcagaactgtgttgga

SEQ ID NO: 8245 - DNA, 20 bp, Artificial Sequence
  Synthetic
gtactgagtgttctttgaga

SEQ ID NO: 8246 - DNA, 20 bp, Artificial Sequence
  Synthetic
gactattctaagtgcacact

SEQ ID NO: 8247 - DNA, 20 bp, Artificial Sequence
  Synthetic
gagctgggatttgccatctt

SEQ ID NO: 8248 - DNA, 20 bp, Artificial Sequence
  Synthetic
gggcgctagtattcgaggat

SEQ ID NO: 8249 - DNA, 20 bp, Artificial Sequence
  Synthetic
gaactgtcccggcttctacc

SEQ ID NO: 8250 - DNA, 20 bp, Artificial Sequence
  Synthetic
ggttcgtaaattcgccgccg

SEQ ID NO: 8251 - DNA, 20 bp, Artificial Sequence
  Synthetic
gggccgaaagagcagccaac

SEQ ID NO: 8252 - DNA, 20 bp, Artificial Sequence
  Synthetic
gtgggacttgttggaattca

SEQ ID NO: 8253 - DNA, 20 bp, Artificial Sequence
  Synthetic
ggcttagggtctgggagtcc

SEQ ID NO: 8254 - DNA, 20 bp, Artificial Sequence
  Synthetic
ggtggaagatagagaaagga

SEQ ID NO: 8255 - DNA, 20 bp, Artificial Sequence
  Synthetic
gttcatgaccagagccagca

SEQ ID NO: 8256 - DNA, 20 bp, Artificial Sequence
  Synthetic
ggaccctgtgtaggtctcaa

SEQ ID NO: 8257 - DNA, 20 bp, Artificial Sequence
  Synthetic
gctggcatatggtgagaggc

SEQ ID NO: 8258 - DNA, 20 bp, Artificial Sequence
  Synthetic
gtctatctagaaacgagggt

SEQ ID NO: 8259 - DNA, 20 bp, Artificial Sequence
  Synthetic
gctgaggattggacagacgt

SEQ ID NO: 8260 - DNA, 20 bp, Artificial Sequence
  Synthetic
gcctttcagggagccagcag

SEQ ID NO: 8261 - DNA, 20 bp, Artificial Sequence
  Synthetic
gccacagtgaacatctgcca

SEQ ID NO: 8262 - DNA, 20 bp, Artificial Sequence
  Synthetic
gggacagggtcgacgaaagg

SEQ ID NO: 8263 - DNA, 20 bp, Artificial Sequence
  Synthetic
gccgtaaatgtgtgtgtgtg

SEQ ID NO: 8264 - DNA, 20 bp, Artificial Sequence
  Synthetic
gtaatcttcagcacactaaa

SEQ ID NO: 8265 - DNA, 20 bp, Artificial Sequence
  Synthetic
ggataaagcaaattgcaaac

SEQ ID NO: 8266 - DNA, 20 bp, Artificial Sequence
  Synthetic
gtgacgtgacgtgctgacgg

SEQ ID NO: 8267 - DNA, 20 bp, Artificial Sequence
  Synthetic
gggcgctgtcacggaaactc

SEQ ID NO: 8268 - DNA, 20 bp, Artificial Sequence
  Synthetic
gctctggaaactgaaaggaa

SEQ ID NO: 8269 - DNA, 20 bp, Artificial Sequence
  Synthetic
ggaaattcgggctatgatac

SEQ ID NO: 8270 - DNA, 20 bp, Artificial Sequence
  Synthetic
gaggagccgagagtgacagt

SEQ ID NO: 8271 - DNA, 20 bp, Artificial Sequence
  Synthetic
gagcgcgggactgttgacag

SEQ ID NO: 8272 - DNA, 20 bp, Artificial Sequence
  Synthetic
gctgactttgaaagcttgtt

SEQ ID NO: 8273 - DNA, 20 bp, Artificial Sequence
  Synthetic
gtgcaaggatgccagataat

SEQ ID NO: 8274 - DNA, 20 bp, Artificial Sequence
  Synthetic
gccgagcaatcgcttgaacg

SEQ ID NO: 8275 - DNA, 20 bp, Artificial Sequence
  Synthetic
gactctccctgacagagggc

SEQ ID NO: 8276 - DNA, 20 bp, Artificial Sequence
  Synthetic
gcccttgtgggttcagggag

SEQ ID NO: 8277 - DNA, 20 bp, Artificial Sequence
  Synthetic
gcactctgcatttacatgaa

SEQ ID NO: 8278 - DNA, 20 bp, Artificial Sequence
  Synthetic
ggcttctagtgacagaggcg

SEQ ID NO: 8279 - DNA, 20 bp, Artificial Sequence
  Synthetic
gagggctgaagggcagaggt

SEQ ID NO: 8280 - DNA, 20 bp, Artificial Sequence
  Synthetic
ggaagggtggctgttgggag

SEQ ID NO: 8281 - DNA, 20 bp, Artificial Sequence
  Synthetic
gtctccgagagcagcagttg

SEQ ID NO: 8282 - DNA, 20 bp, Artificial Sequence
  Synthetic
gttaggaagtagaaattcta

SEQ ID NO: 8283 - DNA, 20 bp, Artificial Sequence
  Synthetic
gttaagcatctatgcctgtg

SEQ ID NO: 8284 - DNA, 20 bp, Artificial Sequence
  Synthetic
gggcaaagacaggttaatcg

SEQ ID NO: 8285 - DNA, 20 bp, Artificial Sequence
  Synthetic
gtcaagcgctttacaatacc

SEQ ID NO: 8286 - DNA, 20 bp, Artificial Sequence
  Synthetic
ggtgggagcaagccacacaa

SEQ ID NO: 8287 - DNA, 20 bp, Artificial Sequence
  Synthetic
gcgagtgttgtatgtttgca

SEQ ID NO: 8288 - DNA, 20 bp, Artificial Sequence
  Synthetic
gggcagagtgagcgagttgg

SEQ ID NO: 8289 - DNA, 20 bp, Artificial Sequence
  Synthetic
gccgcgttgacttcattcgg

SEQ ID NO: 8290 - DNA, 20 bp, Artificial Sequence
  Synthetic
gcacacaagctggcagggag

SEQ ID NO: 8291 - DNA, 20 bp, Artificial Sequence
  Synthetic
gaaccaatgtggctgtggac

SEQ ID NO: 8292 - DNA, 20 bp, Artificial Sequence
  Synthetic
gtttatttcggtgggcgctg

SEQ ID NO: 8293 - DNA, 20 bp, Artificial Sequence
  Synthetic
gaactcttgaattagccggc

SEQ ID NO: 8294 - DNA, 20 bp, Artificial Sequence
  Synthetic
gggagccttggtagaaaggt

SEQ ID NO: 8295 - DNA, 20 bp, Artificial Sequence
  Synthetic
ggccgagccttggataagga

SEQ ID NO: 8296 - DNA, 20 bp, Artificial Sequence
  Synthetic
gggttgtgcagctgcagcag

SEQ ID NO: 8297 - DNA, 20 bp, Artificial Sequence
  Synthetic
gcccagtctatgggtgcgtt

SEQ ID NO: 8298 - DNA, 20 bp, Artificial Sequence
  Synthetic
gcttggtgactctatagcta

SEQ ID NO: 8299 - DNA, 20 bp, Artificial Sequence
  Synthetic
gcttgctgccggcttagagc

SEQ ID NO: 8300 - DNA, 20 bp, Artificial Sequence
  Synthetic
ggcaaagcactagcaaaggg

SEQ ID NO: 8301 - DNA, 20 bp, Artificial Sequence
  Synthetic
gcaaagcccgggatgttaag

SEQ ID NO: 8302 - DNA, 20 bp, Artificial Sequence
  Synthetic
gtggacagctacctctagtt

SEQ ID NO: 8303 - DNA, 20 bp, Artificial Sequence
  Synthetic
gcagcgcgaagcggagaaca

SEQ ID NO: 8304 - DNA, 20 bp, Artificial Sequence
  Synthetic
gagaagtgggaaggtgggaa

SEQ ID NO: 8305 - DNA, 20 bp, Artificial Sequence
  Synthetic
gccctgactcttagtcgcga

SEQ ID NO: 8306 - DNA, 20 bp, Artificial Sequence
  Synthetic
ggtgggagtttccatatttg

SEQ ID NO: 8307 - DNA, 20 bp, Artificial Sequence
  Synthetic
gagtctcgaacgcagggcaa

SEQ ID NO: 8308 - DNA, 20 bp, Artificial Sequence
  Synthetic
gcaacgacaagtatcttctt

SEQ ID NO: 8309 - DNA, 20 bp, Artificial Sequence
  Synthetic
gtaaagccagaggaggaaac

SEQ ID NO: 8310 - DNA, 20 bp, Artificial Sequence
  Synthetic
gggaggaccaggactcaact

SEQ ID NO: 8311 - DNA, 20 bp, Artificial Sequence
  Synthetic
gcagggcccaaatctgtcag

SEQ ID NO: 8312 - DNA, 20 bp, Artificial Sequence
  Synthetic
gtaggatgtcaaagacttgc

SEQ ID NO: 8313 - DNA, 20 bp, Artificial Sequence
  Synthetic
gtgactaacagttagacaaa

SEQ ID NO: 8314 - DNA, 20 bp, Artificial Sequence
  Synthetic
gcttgagaaggtaaagccag

SEQ ID NO: 8315 - DNA, 20 bp, Artificial Sequence
  Synthetic
gattggatggcctgaggatg

SEQ ID NO: 8316 - DNA, 20 bp, Artificial Sequence
  Synthetic
ggagccggaaactactgggc

SEQ ID NO: 8317 - DNA, 20 bp, Artificial Sequence
  Synthetic
gagactttaaaccatttacc
